(19) United States
(12) Patent Application Publication
(10) Pub. No.: US 2023/0272376 A1
(43) Pub. Date: Aug. 31, 2023

(54) METHODS AND COMPOSITIONS FOR THE ADAR-MEDIATED EDITING OF METHYL-CPG BINDING PROTEIN 2 (MECP2)

(71) Applicant: Korro Bio, Inc., Cambridge, MA (US)

(72) Inventors: Matthew Jarpe, Quincy, MA (US); Mallikarjuna Reddy Putta, Lexington, MA (US); Andrew Fraley, Arlington, MA (US)

(21) Appl. No.: 17/985,970

(22) Filed: Nov. 14, 2022

Related U.S. Application Data
(63) Continuation of application No. PCT/US2021/032154, filed on May 13, 2021.
(60) Provisional application No. 63/025,361, filed on May 15, 2020.

(51) Int. Cl. C12N 15/11; C12N 9/78; C12N 15/85; C12N 15/90

(52) U.S. Cl. CPC C12N 15/11; C12Y 305/04004; C12N 9/78; C12N 15/85; C12N 15/90; C12N 2310/321; C12N 2310/315; C12N 2320/34; C12N 2800/107

(57) ABSTRACT

The present invention relates to methods and compositions for editing a MECP2 polynucleotide, e.g., a MECP2 polynucleotide comprising a SNP associated with Rett syndrome. The invention also relates to methods and compositions for treating or preventing Rett syndrome in a subject.

### RELATED APPLICATIONS

[0001] This application is a 35 § U.S.C. 111(a) continuation application which claims the benefit of priority to PCT/US2021/032154, filed on May 13, 2021, which in turn claims the benefit of priority to U.S. Provisional Application No. 63/025,361, filed on May 15, 2020. The entire contents of each of the foregoing applications are incorporated herein by reference.

### SEQUENCE LISTING

[0002] The instant application contains a Sequence Listing which has been submitted electronically in XML file format and is hereby incorporated by reference in its entirety. Said XML copy, created on Jan. 18, 2023, is named 131522_00902_SL.XML and is 6,201,047 bytes in size.

### BACKGROUND OF THE INVENTION

[0003] Rett syndrome is a progressive neurodevelopmental disorder and one of the most common causes of mental retardation in females, with an incidence of 1 in 10-15,000 (Hagberg, Acta Paediatr Scand. 1985 May; 74(3):405-8). Patients with Rett syndrome appear to develop normally until 6-18 months of age, then gradually lose speech and purposeful hand use, and develop microcephaly, seizures, autism, ataxia, intermittent hyperventilation and stereotypic hand movements (Hagberg et al., Ann Neurol. 1983 October; 14(4):471-9). Other features such as ataxia, gait apraxia, seizures, breathing dysrhythmias (apnea or hyperpnea), and autistic behaviour may also emerge. They also suffer decreased somatic growth and wasting. Following this period of rapid deterioration, patients stabilize and then may recover some skills. Over 90% of cases of Rett syndrome are caused by a mutation in the MECP2 gene.

[0004] MECP2 is an abundant chromosome-binding protein that selectively binds 5-methyl cytosine residues in symmetrically positioned CpG dinucleotides in mammalian genomes (Lewis et al., Cell. 1992 Jun. 12; 69(6):905-14). These residues are preferentially located in the promoter regions of genes that are subject to transcriptional silencing after DNA methylation. MECP2 is the molecular link between DNA methylation and transcriptional silencing by histone deacetylation (Nan et al., Nature. 1998 May 28; 393(6683):386-9.). It contains at least two functional domains: an 85 amino acid methyl-CpG-binding domain, essential for its binding to 5-methyl cytosine (Nan et al., Nucleic Acids Res. 1993 Oct. 25; 21(21):4886-92), and a 104 amino acid transcriptional repression domain that interacts with histone deacetylase and the transcriptional corepressor Sin3A. Interactions between this transcription repressor complex and chromatin-bound MECP2 leads to deacetylation of core histones, which in turn leads to transcriptional repression (Nan et al., 1998). Many of the genes that are known to be regulated by the MECP2 protein play a role in normal brain function, particularly the maintenance of synapses.

[0005] While treatments are available for alleviating the symptoms of Rett syndrome, there is no known cure (National Institute of Neurological Disorders and Stroke; October 2017). Accordingly, there exists an ongoing need for novel methods that can selectively and efficiently edit the MECP2 gene, and correct any pathogenic mutations in the gene in order to treat and/or prevent Rett syndrome.

### SUMMARY OF THE INVENTION

[0006] The present invention provides methods and compositions for editing a MECP2 polynucleotide and methods of treating or preventing a MECP2-associated disease, in a subject using a guide oligonucleotide capable of effecting an adenosine deaminase acting on RNA (ADAR)-mediated adenosine to inosine alteration in the target gene.

[0007] The present invention provides methods for the site specific editing of MECP2 in a cell, without the need to transduce or transfect the cell with genetically engineered editing enzymes. The design of the guide oligonucleotides of the present invention allows the recruitment of the ADAR enzyme, to the specific editing sites disclosed herein. The methods of the present invention can conveniently be used to make changes in MECP2, for example to reverse mutations that are involved in, or cause, MECP2-associated disease, thereby alleviating the symptoms of the disease. This is of great advantage when used in treating the MECP2-associated disease, e.g., Rett syndrome. Further, the guide oligonucleotides used in the methods of the present invention provide an ease of delivery and avoid any immune response, e.g., associated with viral vectors. In addition, editing of the MECP2 mRNA preserves the endogenous expression level, transcriptional control, and splice variants of the wild type gene. This is particularly important for the MECP2 gene because over and under expression of the gene can both cause a deleterious phenotype.

[0008] The invention provides, in one aspect, a method of editing an MECP2 polynucleotide comprising a single nucleotide polymorphism (SNP) associated with Rett syndrome. The method comprises contacting the MECP2 polynucleotide with a guide oligonucleotide capable of effecting an adenosine deaminase acting on RNA (ADAR)-mediated adenosine to inosine alteration of the SNP associated with Rett syndrome, thereby editing the MECP2 polynucleotide.

[0009] In some embodiments, the MECP2 polynucleotide is contacted with the guide oligonucleotide in a cell. In some embodiments, the cell endogenously expresses ADAR. In some embodiments, the ADAR is a human ADAR. In some embodiments, the ADAR is human ADAR1. In other embodiments, the ADAR is human ADAR2.

[0010] In some embodiments, the cell is selected from eukaryotic cell, a mammalian cell, and a human cell. In some embodiments, the cell is in vivo. In other embodiments, the cell is ex vivo.

[0011] In one aspect, the present invention provides a method of treating Rett syndrome in a subject in need thereof. The method comprises identifying a subject with a single nucleotide polymorphism (SNP) associated with Rett syndrome in an MECP2 polynucleotide; contacting the MECP2 polynucleotide in a cell of the subject with a guide oligonucleotide capable of effecting an adenosine deaminase acting on RNA (ADAR)-mediated adenosine to inosine alteration of the SNP associated with Rett syndrome, thereby treating the subject.

[0012] In another aspect, the present invention provides a method of treating Rett syndrome in a subject in need thereof. The method comprising identifying a subject with a single nucleotide polymorphism (SNP) associated with Rett syndrome in an MECP2 polynucleotide; contacting the MECP2 polynucleotide in a cell with a guide oligonucleotide capable of effecting an adenosine deaminase acting on RNA (ADAR)-mediated adenosine to inosine alteration of the SNP associated with Rett syndrome, and administering the cell to the subject, thereby treating the subject.

[0013] In some embodiments, the cell is autologous, allogenic, or xenogenic to the subject. In some embodiments, the subject is a human subject.

[0014] In some embodiments, the guide oligonucleotide comprises a nucleic acid sequence complementary to an MECP2 mRNA sequence comprising the SNP associated with Rett syndrome. In other embodiments, the oligonucleotide further comprises one or more adenosine deaminase acting on RNA (ADAR)-recruiting domains.

[0015] In some embodiments, the MECP2 polynucleotide encodes a MECP2 protein comprising a pathogenic amino acid comprising a premature stop codon at positions 255, 168, 294 and/or 270, resulting from the SNP.

[0016] In some embodiments, the adenosine to inosine alteration substitutes the pathogenic amino acid with a wild type amino acid. In some embodiments, the wild type amino acid at positions 255, 168, 294 and 270 comprises an arginine.

[0017] In some embodiments, the guide oligonucleotide comprises the structure:

[Aₘ]-X¹-X²-X³—[Bₙ]

[0018] wherein each of A and B is a nucleotide; m and n are each, independently, an integer from 1 to 50; X¹, X², and X³ are each, independently, a nucleotide, wherein at least one of X¹, X², or X³ is an alternative nucleotide.

[0019] In other embodiments, the guide oligonucleotide comprises the structure:

[Aₘ]-X¹-X²-X³—[Bₙ]

[0020] wherein each of A and B is a nucleotide; m and n are each, independently, an integer from 1 to 50; X¹, X², and X³ are each, independently, a nucleotide, wherein at least one of X¹, X², or X³ has the structure of any one of Formula I-V:

[chemical structure]

[0021] wherein N¹ is hydrogen or a nucleobase; R¹ is hydroxy, halogen, or C₁-C₆ alkoxy; R² is hydrogen, hydroxy, halogen, or C₁-C₆ alkoxy; R³ is hydrogen, hydroxy, halogen, or C₁-C₆ alkoxy; R⁴ is hydrogen, hydroxy, halogen, or C₁-C₆ alkoxy; and R⁵ is hydrogen, hydroxy, halogen, or C₁-C₆ alkoxy. In some embodiments, R⁴ is hydrogen and R⁵ is not hydrogen or hydroxy, R⁵ is hydrogen and R⁴ is not hydrogen, or R⁵ is hydroxy and R⁴ is not hydrogen.

[0022] In some embodiments, at least 80% of the nucleotides of [Aₘ] and/or [Bₙ] include a nucleobase, a sugar, and an internucleoside linkage.

[0023] In some embodiments, R¹ is hydroxy, halogen, or OCH₃. In other embodiments, R² is hydrogen.

[0024] In some embodiments, at least one of X¹, X², or X³ has the structure of Formula I, Formula II, or Formula V; and none of X¹, X², or X³ has the structure of Formula IV or Formula III. In other embodiments, at least one of X¹, X², or X³ has the structure of Formula I or Formula II; and none of X¹, X², or X³ has the structure of Formula III, Formula IV, or Formula V.

[0025] In some embodiments, the halogen is fluoro.

[0026] In other embodiments, at least one of X¹, X², and X³ has the structure of Formula I, wherein R¹ is fluoro and N¹ is a nucleobase. In some embodiments, X¹ has the structure of Formula I, wherein R¹ is fluoro and N¹ is a nucleobase. In other embodiments, X² has the structure of Formula I, wherein R¹ is fluoro and N¹ is a nucleobase. In some embodiments, X³ has the structure of Formula I, wherein R¹ is fluoro and N¹ is a nucleobase. In other embodiments, at least one of X¹, X², and X³ has the structure of Formula I, wherein R¹ is hydroxy and N¹ is a nucleobase. In some embodiments, X¹ has the structure of Formula I, wherein R¹ is hydroxy and N¹ is a nucleobase. In other embodiments, X² has the structure of Formula I, wherein R¹ is hydroxy and N¹ is a nucleobase. In some embodiments, X³ has the structure of Formula I, wherein R¹ is hydroxy and N¹ is a nucleobase. In other embodiments, at least one of X¹, X², and X³ has the structure of Formula I, wherein R¹ is methoxy and N¹ is a nucleobase. In some embodiments, X¹ has the structure of Formula I, wherein R¹ is methoxy and N¹ is a nucleobase; and each of X² and X³ is a ribonucleotide. In other embodiments, X² has the structure of Formula I, wherein R¹ is methoxy and N¹ is a nucleobase. In some embodiments, X³ has the structure of Formula I, wherein R¹ is methoxy and N¹ is a nucleobase.

[0027] In some embodiments, at least one of X¹, X², and X³ has the structure of Formula II, wherein R² is hydrogen and N¹ is a nucleobase. In some embodiments, X² has the structure of Formula II, wherein R² is hydrogen and N¹ is a nucleobase.

[0028] In other embodiments, at least one of X¹ and X² has the structure of Formula V. In some embodiments, X² has the structure of Formula V, wherein R⁴ is hydrogen and R⁵ is hydrogen. In other embodiments, X² has the structure of Formula V, wherein R⁴ is hydrogen and R⁵ is hydroxy. In some embodiments, X¹ has the structure of Formula V, wherein R⁴ is hydrogen and R⁵ is hydrogen. In other embodiments, X¹ has the structure of Formula V, wherein R⁴ is hydrogen and R⁵ is hydroxy. In some embodiments, X² has the structure of Formula V, wherein R⁴ is hydrogen and R⁵ is methoxy.

[0029] In some embodiments, when X¹ has the structure of any one of Formulas I to V, each of X² and X³ is, independently, a ribonucleotide, a 2′-O—C₁-C₆ alkyl-nucleotide, a 2′-amino-nucleotide, an arabinonucleic acid-nucleotide, a bicyclic-nucleotide, a 2′-F-nucleotide, 2′-O-methoxyethyl-nucleotide, a constrained ethyl-nucleotide, a LNA-nucleotide, or a DNA-nucleotide; when X² has the structure of any one of Formulas I to V, each of X¹ and X³ is, independently, a ribonucleotide, a 2′-O—C₁-C₆ alkyl-nucleotide, a 2′-amino-nucleotide, an arabinonucleic acid-nucleotide, a bicyclic-nucleotide, a 2′-F-nucleotide, 2′-O-methoxyethyl-nucleotide, a constrained ethyl-nucleotide, a LNA-nucleotide, or a DNA-nucleotide; when X³ has the structure of any one of Formulas I to V, each of X¹ and X² is, independently, a ribonucleotide, a 2′-O—C₁-C₆ alkyl-nucleotide, a 2′-amino-nucleotide, an arabinonucleic acid-nucleotide, a bicyclic-nucleotide, a 2′-F-nucleotide, 2′-O-methoxyethyl-nucleotide, a constrained ethyl-nucleotide, a LNA-nucleotide, or a DNA-nucleotide; when X¹ and X² each have the structure of any one of Formulas I to V, X³ is a ribonucleotide, a 2′-O—C₁-C₆ alkyl-nucleotide, a 2′-amino-nucleotide, an arabinonucleic acid-nucleotide, a bicyclic-nucleotide, a 2′-F-nucleotide, 2′-O-methoxyethyl-nucleotide, a constrained ethyl-nucleotide, a LNA-nucleotide, or a DNA-nucleotide; when X¹ and X³ each have the structure of any one of Formulas I to V, X² is a ribonucleotide, a 2′-O—C₁-C₆ alkyl-nucleotide, a 2′-amino-nucleotide, an arabinonucleic acid-nucleotide, a bicyclic-nucleotide, a 2′-F-nucleotide, 2′-O-methoxyethyl-nucleotide, a constrained ethyl-nucleotide, a LNA-nucleotide, or a DNA-nucleotide; and when X² and X³ each have the structure of any one of Formulas I to V, X¹ is a ribonucleotide, a 2′-O—C₁-C₆ alkyl-nucleotide, a 2′-amino-nucleotide, an arabinonucleic acid-nucleotide, a bicyclic-nucleotide, a 2′-F-nucleotide, 2′-O-methoxyethyl-nucleotide, a constrained ethyl-nucleotide, a LNA-nucleotide, or a DNA-nucleotide.

[0030] In other embodiments, when X¹ has the structure of any one of Formulas I to V, each of X² and X³ is, independently, a ribonucleotide, a 2′-F-nucleotide, 2′-O-methoxyethyl-nucleotide, or a DNA-nucleotide; when X² has the structure of any one of Formulas I to V, each of X¹ and X³ is, independently, a ribonucleotide, a 2′-F-nucleotide, 2′-O-methoxyethyl-nucleotide, or a DNA-nucleotide; when X³ has the structure of any one of Formulas I to V, each of X¹ and X² is, independently, a ribonucleotide, a 2′-F-nucleotide, 2′-O-methoxyethyl-nucleotide, or a DNA-nucleotide; when X¹ and X² each have the structure of any one of Formulas I to V, X³ is a ribonucleotide, a 2′-F-nucleotide, 2′-O-methoxyethyl-nucleotide, or a DNA-nucleotide; when X¹ and X³ each have the structure of any one of Formulas I to V, X² is a ribonucleotide, a 2′-F-nucleotide, 2′-O-methoxyethyl-nucleotide, or a DNA-nucleotide; and when X² and X³ each have the structure of any one of Formulas I to V, X¹ is a ribonucleotide, a 2′-F-nucleotide, 2′-O-methoxyethyl-nucleotide, or a DNA-nucleotide.

[0031] In some embodiments, when X¹ has the structure of any one of Formulas I to V, each of X² and X³ is a ribonucleotide; when X² has the structure of any one of Formulas I to V, each of X¹ and X³ is a ribonucleotide; when X³ has the structure of any one of Formulas I to V, each of X¹ and X² is a ribonucleotide; when X¹ and X² each have the structure of any one of Formulas I to V, X³ is a ribonucleotide; when X¹ and X³ each have the structure of any one of Formulas I to V, X² is a ribonucleotide; and when X² and X³ each have the structure of any one of Formulas I to V, X¹ is a ribonucleotide.

[0032] In some embodiments, none of X¹, X², and X³ has the structure of Formula II, wherein N¹ is a nucleobase. In other embodiments, none of X¹, X², and X³ has the structure of Formula II, wherein N¹ is a cytosine nucleobase.

[0033] In some embodiments, X¹ comprises a uracil or thymine nucleobase. In other embodiments, X¹ comprises a uracil nucleobase. In some embodiments, X¹ comprises a hypoxanthine nucleobase. In other embodiments, X¹ comprises a cytosine nucleobase.

[0034] In some embodiments, X³ comprises a guanine nucleobase. In other embodiments, X³ comprises a hypoxanthine nucleobase. In some embodiments, X³ comprises an adenine nucleobase.

[0035] In some embodiments, X² comprises a cytosine or 5-methylcytosine nucleobase. In other embodiments, X² comprises a cytosine nucleobase. In some embodiments, X² has the structure of any one of Formula I-V. In other embodiments, X² is not a 2′-O-methyl-nucleotide.

[0036] In some embodiments, X¹, X², and X³ are not 2′-O-methyl-nucleotides.

[0037] In some embodiments, the guide oligonucleotide comprises the structure:

[Aₘ]-X¹-X²-X³—[Bₙ]

[0038] wherein each of A and B is a nucleotide; m and n are each, independently, an integer from 1 to 50; X¹, X², and X³ are each, independently, a nucleotide, wherein at least one of X¹, X², or X³ has the structure of any one of Formula VI-XI:

[chemical structure]

wherein N¹ is hydrogen or a nucleobase; R¹² is hydrogen, hydroxy, fluoro, halogen, C₁-C₆ alkyl, C₁-C₆ heteroalkyl, or C₁-C₆ alkoxy; R¹³ is hydrogen or C₁-C₆ alkyl, wherein at least one of X¹, X², or X³ has the structure of any one of Formula VI-IX.

[0039] In some embodiments, at least 80% of the nucleotides of [Aₘ] and/or [Bₙ] include a nucleobase, a sugar, and an internucleoside linkage.

[0040] In some embodiments, R¹² is hydrogen, halogen, C₁-C₆ alkyl, or C₁-C₆ heteroalkyl. In other embodiments, the halogen is fluoro. In some embodiments, R¹² is hydrogen or C₁-C₆ alkyl; In other embodiments, R¹² is hydrogen.

[0041] In some embodiments, at least one of X¹, X², and X³ has the structure of Formula VI, and N¹ is a nucleobase. In other embodiments, X¹ has the structure of Formula VI, and NV is a nucleobase. In some embodiments, X² has the structure of Formula VI, and N¹ is a nucleobase.

[0042] In some embodiments, at least one of X¹, X², and X³ has the structure of Formula VII, and N¹ is a nucleobase. In some embodiments, X¹ has the structure of Formula VII, and N¹ is a nucleobase. In other embodiments, X² has the structure of Formula VII, and N¹ is a nucleobase.

[0043] In some embodiments, at least one of X¹, X², and X³ has the structure of Formula IX, and N¹ is a nucleobase. In some embodiments, X¹ has the structure of Formula IX, and N¹ is a nucleobase. In other embodiments, X² has the structure of Formula IX, and N¹ is a nucleobase.

[0044] In some embodiments, at least one of X¹, X², and X³ has the structure of Formula VIII, and N¹ is a nucleobase. In some embodiments, X¹ has the structure of Formula VIII, and N¹ is a nucleobase. In other embodiments, X² has the structure of Formula VIII, and N¹ is a nucleobase.

[0045] In some embodiments, X² does not have the structure of Formula VI. In other embodiments, X³ does not have the structure of Formula VI. In some embodiments, X² does not have the structure of Formula VII. In other embodiments, X³ does not have the structure of Formula VII. In some embodiments, X² does not have the structure of Formula IX. In other embodiments, X² has the structure of Formula VI or Formula VII.

[0046] In some embodiments, when X¹ has the structure of any one of Formulas VI to XI, each of X² and X³ is, independently, a ribonucleotide, a 2′-O—C₁-C₆ alkyl-nucleotide, a 2′-amino-nucleotide, an arabinonucleic acid-nucleotide, a bicyclic-nucleotide, a 2′-F-nucleotide, 2′-O-methoxyethyl-nucleotide, a constrained ethyl-nucleotide, a LNA-nucleotide, or a DNA-nucleotide; when X² has the structure of any one of Formulas VI to XI, each of X¹ and X³ is, independently, a ribonucleotide, a 2′-O—C₁-C₆ alkyl-nucleotide, a 2′-amino-nucleotide, an arabinonucleic acid-nucleotide, a bicyclic-nucleotide, a 2′-F-nucleotide, 2′-O-methoxyethyl-nucleotide, a constrained ethyl-nucleotide, a LNA-nucleotide, or a DNA-nucleotide; when X³ has the structure of any one of Formulas VI to XI, each of X¹ and X² is, independently, a ribonucleotide, a 2′-O—C₁-C₆ alkyl-nucleotide, a 2′-amino-nucleotide, an arabinonucleic acid-nucleotide, a bicyclic-nucleotide, a 2′-F-nucleotide, 2′-O-methoxyethyl-nucleotide, a constrained ethyl-nucleotide, a LNA-nucleotide, or a DNA-nucleotide; when X¹ and X² each have the structure of any one of Formulas VI to XI, X³ is a ribonucleotide, a 2′-O—C₁-C₆ alkyl-nucleotide, a 2′-amino-nucleotide, an arabinonucleic acid-nucleotide, a bicyclic-nucleotide, a 2′-F-nucleotide, 2′-O-methoxyethyl-nucleotide, a constrained ethyl-nucleotide, a LNA-nucleotide, or a DNA-nucleotide; when X¹ and X³ each have the structure of any one of Formulas VI to XI, X² is a ribonucleotide, a 2′-O—C₁-C₆ alkyl-nucleotide, a 2′-amino-nucleotide, an arabinonucleic acid-nucleotide, a bicyclic-nucleotide, a 2′-F-nucleotide, 2′-O-methoxyethyl-nucleotide, a constrained ethyl-nucleotide, a LNA-nucleotide, or a DNA-nucleotide; and when X² and X³ each have the structure of any one of Formulas VI to XI, X¹ is a ribonucleotide, a 2′-O—C₁-C₆ alkyl-nucleotide, a 2′-amino-nucleotide, an arabinonucleic acid-nucleotide, a bicyclic-nucleotide, a 2′-F-nucleotide, 2′-O-methoxyethyl-nucleotide, a constrained ethyl-nucleotide, a LNA-nucleotide, or a DNA-nucleotide.

[0047] In other embodiments, when X¹ has the structure of any one of Formulas VI to XI, each of X² and X³ is, independently, a ribonucleotide, a 2′-F-nucleotide, 2′-O-methoxyethyl-nucleotide, or a DNA-nucleotide; when X² has the structure of any one of Formulas VI to XI, each of X¹ and X³ is, independently, a ribonucleotide, a 2′-F-nucleotide, 2′-O-methoxyethyl-nucleotide, or a DNA-nucleotide; when X³ has the structure of any one of Formulas VI to XI, each of X¹ and X² is, independently, a ribonucleotide, a 2′-F-nucleotide, 2′-O-methoxyethyl-nucleotide, or a DNA-nucleotide; when X¹ and X² each have the structure of any one of Formulas VI to XI, X³ is a ribonucleotide, a 2′-F-nucleotide, 2′-O-methoxyethyl-nucleotide, or a DNA-nucleotide; when X¹ and X³ each have the structure of any one of Formulas VI to XI, X² is a ribonucleotide, a 2′-F-nucleotide, 2′-O-methoxyethyl-nucleotide, or a DNA-nucleotide; and when X² and X³ each have the structure of any one of Formulas VI to XI, X¹ is a ribonucleotide, a 2′-F-nucleotide, 2′-O-methoxyethyl-nucleotide, or a DNA-nucleotide.

[0048] In some embodiments, when X¹ has the structure of any one of Formulas VI to XI, each of X² and X³ is a ribonucleotide; when X² has the structure of any one of Formulas VI to XI, each of X¹ and X³ is a ribonucleotide; when X³ has the structure of any one of Formulas VI to XI, each of X¹ and X² is a ribonucleotide; when X¹ and X² each have the structure of any one of Formulas VI to XI, X³ is a ribonucleotide; when X¹ and X³ each have the structure of any one of Formulas VI to XI, X² is a ribonucleotide; and when X² and X³ each have the structure of any one of Formulas VI to XI, X¹ is a ribonucleotide.

[0049] In some embodiments, X¹ comprises a hypoxanthine nucleobase. In other embodiments, X¹ comprises a uracil nucleobase. In some embodiments, X¹ comprises a cytosine nucleobase. In other embodiments, X³ comprises a hypoxanthine nucleobase. In some embodiments, X³ comprises a guanine nucleobase. In other embodiments, X³ comprises a adenine nucleobase. In some embodiments, X² comprises a cytosine nucleobase. In other embodiments, X² comprises a uracil nucleobase. In some embodiments, X² does not include a nucleobase. In other embodiments, X² is not a 2′-O-methyl-nucleotide. In some embodiments, X¹, X², and X³ are not 2′-O-methyl-nucleotides.

[0050] In some embodiments, the guide oligonucleotide comprises the structure:

[Aₘ]-X¹-X²-X³—[Bₙ]

[0051] wherein each of A and B is a nucleotide; m and n are each, independently, an integer from 1 to 50; X¹, X², and X³ are each, independently, a nucleotide, wherein at least one of X¹, X², and X³ has the structure of any one of Formula XII-XV:

[chemical structure]

[0052] wherein N¹ is hydrogen or a nucleobase; R⁶ is hydrogen, hydroxy, or halogen; R⁷ is hydrogen, hydroxy, halogen, or C₁-C₆ alkoxy; R⁸ is hydrogen or halogen; R⁹ is hydrogen or hydroxy, halogen, or C₁-C₆ alkoxy; R¹⁰ Is hydrogen or halogen; and R¹¹ is hydrogen or hydroxy, halogen, or C₁-C₆ alkoxy.

[0053] In some embodiments, at least 80% of the nucleotides of [Aₘ] and/or [Bₙ] include a nucleobase, a sugar, and an internucleoside linkage.

[0054] In some embodiments, halogen is fluoro.

[0055] In some embodiments, C₁-C₆ alkoxy is OCH₃.

[0056] In some embodiments, at least one of X¹, X², and X³ has the structure of Formula XIII, in which each of R⁸ and R⁹ is hydrogen. In some embodiments, X¹ has the structure of Formula XIII, in which each of R⁸ and R⁹ is hydrogen. In other embodiments, X² has the structure of Formula XIII, in which each of R⁸ and R⁹ is hydrogen. In some embodiments, X² has the structure of any one of Formula XII-XV.

[0057] In some embodiments, when X¹ has the structure of any one of Formulas XII-XV, each of X² and X³ is, independently, a ribonucleotide, a 2′-O—C₁-C₆ alkyl-nucleotide, a 2′-amino-nucleotide, an arabinonucleic acid-nucleotide, a bicyclic-nucleotide, a 2′-F-nucleotide, 2′-O-methoxyethyl-nucleotide, a constrained ethyl-nucleotide, a LNA-nucleotide, or a DNA-nucleotide; when X² has the structure of any one of Formulas XII-XV, each of X¹ and X³ is, independently, a ribonucleotide, a 2′-O—C₁-C₆ alkyl-nucleotide, a 2′-amino-nucleotide, an arabinonucleic acid-nucleotide, a bicyclic-nucleotide, a 2′-F-nucleotide, 2′-O-methoxyethyl-nucleotide, a constrained ethyl-nucleotide, a LNA-nucleotide, or a DNA-nucleotide; when X³ has the structure of any one of Formulas XII-XV, each of X¹ and X² is, independently, a ribonucleotide, a 2′-O—C₁-C₆ alkyl-nucleotide, a 2′-amino-nucleotide, an arabinonucleic acid-nucleotide, a bicyclic-nucleotide, a 2′-F-nucleotide, 2′-O-methoxyethyl-nucleotide, a constrained ethyl-nucleotide, a LNA-nucleotide, or a DNA-nucleotide; when X¹ and X² each have the structure of any one of Formulas XII-XV, X³ is a ribonucleotide, a 2′-O—C₁-C₆ alkyl-nucleotide, a 2′-amino-nucleotide, an arabinonucleic acid-nucleotide, a bicyclic-nucleotide, a 2′-F-nucleotide, 2′-O-methoxyethyl-nucleotide, a constrained ethyl-nucleotide, a LNA-nucleotide, or a DNA-nucleotide; when X¹ and X³ each have the structure of any one of Formulas XII-XV, X² is a ribonucleotide, a 2′-O—C₁-C₆ alkyl-nucleotide, a 2′-amino-nucleotide, an arabinonucleic acid-nucleotide, a bicyclic-nucleotide, a 2′-F-nucleotide, 2′-O-methoxyethyl-nucleotide, a constrained ethyl-nucleotide, a LNA-nucleotide, or a DNA-nucleotide; and when X² and X³ each have the structure of any one of Formulas XII-XV, X¹ is a ribonucleotide, a 2′-O—C₁-C₆ alkyl-nucleotide, a 2′-amino-nucleotide, an arabinonucleic acid-nucleotide, a bicyclic-nucleotide, a 2′-F-nucleotide, 2′-O-methoxyethyl-nucleotide, a constrained ethyl-nucleotide, a LNA-nucleotide, or a DNA-nucleotide.

[0058] In other embodiments, when X¹ has the structure of any one of Formulas XII-XV, each of X² and X³ is, independently, a ribonucleotide, a 2′-F-nucleotide, 2′-O-methoxyethyl-nucleotide, or a DNA-nucleotide; when X² has the structure of any one of Formulas XII-XV, each of X¹ and X³ is, independently, a ribonucleotide, a 2′-F-nucleotide, 2′-O-methoxyethyl-nucleotide, or a DNA-nucleotide; when X³ has the structure of any one of Formulas XII-XV, each of X¹ and X² is, independently, a ribonucleotide, a 2′-F-nucleotide, 2′-O-methoxyethyl-nucleotide, or a DNA-nucleotide; when X¹ and X² each have the structure of any one of Formulas XII-XV, X³ is a ribonucleotide, a 2′-F-nucleotide, 2′-O-methoxyethyl-nucleotide, or a DNA-nucleotide; when X¹ and X³ each have the structure of any one of Formulas XII-XV, X² is a ribonucleotide, a 2′-F-nucleotide, 2′-O-methoxyethyl-nucleotide, or a DNA-nucleotide; and when X² and X³ each have the structure of any one of Formulas XII-XV, X¹ is a ribonucleotide, a 2′-F-nucleotide, 2′-O-methoxyethyl-nucleotide, or a DNA-nucleotide.

[0059] In some embodiments, when X¹ has the structure of any one of Formulas XII-XV, each of X² and X³ is a ribonucleotide; when X² has the structure of any one of Formulas XII-XV, each of X¹ and X³ is a ribonucleotide; when X³ has the structure of any one of Formulas XII-XV, each of X¹ and X² is a ribonucleotide; when X¹ and X² each have the structure of any one of Formulas XII-XV, X³ is a ribonucleotide; when X¹ and X³ each have the structure of any one of Formulas XII-XV, X² is a ribonucleotide; and when X² and X³ each have the structure of any one of Formulas XII-XV, X¹ is a ribonucleotide.

[0060] In some embodiments, X¹ includes a hypoxanthine nucleobase. In other embodiments, X¹ includes a uracil nucleobase. In some embodiments, X¹ includes a cytosine nucleobase. In other embodiments, X³ includes a hypoxanthine nucleobase. In some embodiments, X³ includes an adenine nucleobase. In other embodiments, X² includes a cytosine nucleobase. In some embodiments, X² includes a uracil nucleobase. In other embodiments, X² does not include a nucleobase. In some embodiments, X² is not a 2′-O-methyl-nucleotide. In other embodiments, X¹, X², and X³ are not 2′-O-methyl-nucleotides.

[0061] In some embodiments, [Aₘ] comprises at least one nuclease resistant nucleotide. In other embodiments, [Aₘ] comprises at least one 2′-O—C₁-C₆ alkyl-nucleotide, at least one 2′-amino-nucleotide, at least one arabino nucleic acid-nucleotide, at least one bicyclic-nucleotide, at least one 2′-F-nucleotide, at least one 2′-O-methoxyethyl-nucleotide, at least one constrained ethyl (cEt)-nucleotide, at least one LNA-nucleotide, and/or at least one DNA-nucleotide.

[0062] In some embodiments, [Aₘ] comprises at least one 2′-O-methyl-nucleotide, at least one 2′-F-nucleotide, at least one 2′-O-methoxyethyl-nucleotide, at least one cEt-nucleotide, at least one LNA-nucleotide, and/or at least one DNA-nucleotide. In other embodiments, [Aₘ] comprises at least five terminal 2′-O-methyl-nucleotides. In some embodiments, [Aₘ] comprises at least one phosphorothioate linkage. In other embodiments, [Aₘ] comprises at least four terminal phosphorothioate linkages. In some embodiments, at least one phosphorothioate linkage is stereopure.

[0063] In some embodiments, [Bₙ] comprises at least one nuclease resistant nucleotide. In other embodiments, [Bₙ] comprises at least one at least one 2′-O—C₁-C₆ alkyl-nucleotide, at least one 2′-amino-nucleotide, at least one arabino nucleic acid-nucleotide, at least one bicyclic-nucleotide, at least one 2′-F-nucleotide, at least one 2′-O-methoxyethyl-nucleotide, at least one cEt-nucleotide, at least one LNA-nucleotide, and/or at least one DNA-nucleotide.

[0064] In some embodiments, [Bₙ] comprises at least one 2′-O-methyl-nucleotide, at least one 2′-F-nucleotide, at least one 2′-O-methoxyethyl-nucleotide, at least one cEt-nucleotide, at least one LNA-nucleotide, and/or at least one DNA-nucleotide. In other embodiments, [Bₙ] comprises at least five terminal 2′-O-methyl-nucleotides. In some embodiments, [Bₙ] comprises at least one phosphorothioate linkage. In other embodiments, [B₁] comprises at least four terminal phosphorothioate linkages. In some embodiments, at least one phosphorothioate linkage is stereopure.

[0065] In some embodiments, at least 20% of the nucleotides of [Aₘ] and [Bₙ] combined are 2′-O-methyl-nucleotides.

[0066] In some embodiments, the oligonucleotide further comprises a 5′-cap structure. In other embodiments, the oligonucleotide comprises at least one alternative nucleobase. In some embodiments, the 5′-terminal nucleotide is a 2′-amino-nucleotide.

[0067] In other embodiments, A and B combined consist of 18 to 80 nucleotides. In some embodiments, m is 5 to 40. In other embodiments, n is 5 to 40.

[0068] In some embodiments, m and n are each, independently, an integer from 5 to 40; at least one of X¹, X², and X³ has the structure of Formula I, wherein R¹ is fluoro, hydroxy, or methoxy and N¹ is a nucleobase, or the structure of Formula V, wherein R⁴ is hydrogen and R⁵ is hydrogen; each of X¹, X², and X³ that does not have the structure of Formula I or Formula V is a ribonucleotide; [Aₘ] and [Bₙ] each comprise at least five terminal 2′-O-methyl-nucleotides and at least four terminal phosphorothioate linkages; and at least 20% of the nucleotides of [Aₘ] and [Bₙ] combined are 2′-O-methyl-nucleotides.

[0069] In other embodiments, m and n are each, independently, an integer from 5 to 40; at least one of X¹, X², and X³ has the structure of Formula VI, Formula VII, Formula VIII, or Formula IX, wherein N¹ is a nucleobase and each of X¹, X², and X³ that does not have the structure of Formula VI, Formula VII, Formula VIII, or Formula IX is a ribonucleotide; [Aₘ] and [Bₙ] each include at least five terminal 2′-O-methyl-nucleotides and at least four terminal phosphorothioate linkages; and at least 20% of the nucleotides of [Aₘ] and [Bₙ] combined are 2′-O-methyl-nucleotides.

[0070] In some embodiments, m and n are each, independently, an integer from 5 to 40; at least of X¹, X², and X³ has the structure of Formula XIII, wherein R⁸ and R⁹ are each hydrogen, and each of X¹, X² and X³ that does not have the structure of Formula XII is a ribonucleotide; [Aₘ] and [Bₙ] each include at least five terminal 2′-O-methyl-nucleotides and at least four terminal phosphorothioate linkages; and at least 20% of the nucleotides of [Aₘ] and [B₁] combined are 2′-O-methyl-nucleotides.

### DETAILED DESCRIPTION OF THE INVENTION

[0071] The present invention provides methods of editing a MECP2 polynucleotide, e.g., a MECP2 polynucleotide comprising a single nucleotide polymorphism (SNP) associated with Rett syndrome, and methods for treating or preventing a MECP2-associated disease, e.g., Rett syndrome, in a subject using a guide oligonucleotide capable of effecting an adenosine deaminase acting on RNA (ADAR)-mediated adenosine to inosine alteration in the target gene, e.g., an ADAR-mediated adenosine to inosine alternation of the SNP associated with Rett syndrome.

[0072] The present invention provides methods for the site specific editing of MECP2 in a cell, without the need to transduce or transfect the cell with genetically engineered editing enzymes. The design of the guide oligonucleotides of the present invention allows the recruitment of the ADAR enzyme, to the specific editing sites disclosed herein. The methods of the present invention can conveniently be used to make changes in MECP2, for example to reverse mutations that are involved in, or cause, MECP2-associated disease, thereby alleviating the symptoms of the disease. This is of great advantage when used in treating the MECP2-associated disease, e.g., Rett syndrome. Further, the guide oligonucleotides used in the methods of the present invention provide an ease of delivery and avoid any immune response, e.g., associated with viral vectors. In addition, editing of the MECP2 mRNA preserves the endogenous expression level, transcriptional control, and splice variants of the wild type gene. This is particularly important for the MECP2 gene because over and under expression of the gene can both cause a deleterious phenotype.

[0073] The following detailed description discloses methods for editing a MECP2 polynucleotide using a guide oligonucleotide capable of effecting an ADAR-mediated adenosine to inosine alteration, how to make and use compositions containing the guide oligonucleotides capable of effecting an ADAR-mediated adenosine to inosine alteration, as well as compositions, uses, and methods for treating subjects having a MECP2-associated disease that would benefit from editing the sequence of a MECP2 gene.

### I. Definitions

[0074] In order that the present invention may be more readily understood, certain terms are first defined. In addition, it should be noted that whenever a value or range of values of a parameter are recited, it is intended that values and ranges intermediate to the recited values are also intended to be part of this invention.

[0075] The articles “a” and “an” are used herein to refer to one or to more than one (i.e., to at least one) of the grammatical object of the article. By way of example, “an element” means one element or more than one element, e.g., a plurality of elements.

[0076] The term “including” is used herein to mean, and is used interchangeably with, the phrase “including, but not limited to”.

[0077] The term “or” is used herein to mean, and is used interchangeably with, the term “and/or,” unless context clearly indicates otherwise.

[0078] The term “about” is used herein to mean within the typical ranges of tolerances in the art, e.g., acceptable variation in time between doses, acceptable variation in dosage unit amount. For example, “about” can be understood as within about 2 standard deviations from the mean. In certain embodiments, about means+10%. In certain embodiments, about means+5%. When about is present before a series of numbers or a range, it is understood that “about” can modify each of the numbers in the series or range.

[0079] The term “at least” prior to a number or series of numbers is understood to include the number adjacent to the term “at least”, and all subsequent numbers or integers that could logically be included, as clear from context. For example, the number of nucleotides in a nucleic acid molecule must be an integer. For example, “at least 18 nucleotides of a 21-nucleotide nucleic acid molecule” means that 18, 19, 20, or 21 nucleotides have the indicated property. When at least is present before a series of numbers or a range, it is understood that “at least” can modify each of the numbers in the series or range.

[0080] As used herein, “central triplet” or the “triplet” is understood as the three nucleotides opposite the target adenosine in the target RNA, wherein the middle nucleotide in the central triplet is directly opposite the target adenosine. The central triplet does not have to be in the middle (in the center) of the guide oligonucleotide, it may be located more to the 3′ as well as to the 5′ end of the guide oligonucleotide, whatever is preferred for a certain target. Central in this aspect has therefore more the meaning of the triplet that is in the center of catalytic activity when it comes to chemical modifications and targeting the target adenosine. It should also be noted that the guide oligonucleotides are sometimes depicted from 3′ to 5′, especially when the target sequence is shown from 5′ to 3′. However, whenever herein the order of nucleotides within the guide oligonucleotide is discussed it is always from 5′ to 3′ of the guide oligonucleotide. The position can also be expressed in terms of a particular nucleotide within the guide oligonucleotide while still adhering to the 5′ to 3′ directionality, in which case other nucleotides 5′ of the said nucleotide are marked as negative positions and those 3′ of it as positive positions. For example, the C in the Central triplet is the nucleotide (at the 0 position) opposite the targeted adenosine and the U would in this case be the −1 nucleotide and the G would then be the +1 nucleotide, etc.

[0081] As used herein, “no more than” or “less than” is understood as the value adjacent to the phrase and logical lower values or integers, as logical from context, to zero. For example, an oligonucleotide with “no more than 5 unmodified nucleotides” has 5, 4, 3, 2, 1, or 0 unmodified nucleotides. When “no more than” is present before a series of numbers or a range, it is understood that “no more than” can modify each of the numbers in the series or range.

[0082] As used herein, a “MECP2” refers to the well-known gene and protein. MECP2 is also known as Methyl-CpG Binding Protein 2, AUTSX3, MRXS13, MRXSL, MRX16, MRX79, MeCp2, PPMX, RTS, RTT, or RS. MECP2 is an abundant chromosome-binding protein that selectively binds 5-methyl cytosine residues in symmetrically positioned CpG dinucleotides in mammalian genomes (Lewis et al., Cell. 1992 Jun. 12; 69(6):905-14). These residues are preferentially located in the promoter regions of genes that are subject to transcriptional silencing after DNA methylation. MECP2 is the molecular link between DNA methylation and transcriptional silencing by histone deacetylation (Nan et al., Nature. 1998 May 28; 393(6683):386-9.). It contains at least two functional domains: an 85 amino acid methyl-CpG-binding domain, essential for its binding to 5-methyl cytosine (Nan et al., Nucleic Acids Res. 1993 Oct. 25; 21(21):4886-92), and a 104 amino acid transcriptional repression domain that interacts with histone deacetylase and the transcriptional corepressor Sin3A. Interactions between this transcription repressor complex and chromatin-bound MECP2 leads to deacetylation of core histones, which in turn leads to transcriptional repression (Nan et al., 1998). Many of the genes that are known to be regulated by the MECP2 protein play a role in normal brain function, particularly the maintenance of synapses. Reduced expression of MECP2 in Mecp2+/− neural stem cells causes an increase in senescence, impairment of proliferative capacity and accumulation of unrepaired DNA damages (Alessio et al., 2018. Exp. Mol. Med. 50 (3): 1). MECP2 gene expression is tightly regulated, and MECP2 duplication leads to a severe neurodevelopmental phenotype. The role of MECP2 in disease is primarily associated with either a loss of function (under expression) of the MECP2 gene in Rett syndrome or a gain of function in MECP2 duplication syndrome. Many mutations associated with loss of expression of the MECP2 gene have been identified in Rett syndrome patients. In particular, high frequency missense mutations at position 255 of the MECP2 protein is associated with Rett syndrome. The sequence of a human MECP2 mRNA transcript can be found at National Center for Biotechnology Information (NCBI) RefSeq accession number NM_004992 (SEQ ID NO: 57). Additional examples of MECP2 mRNA sequences are readily available using publicly available databases, e.g., GenBank, UniProt, and OMIM.

[0083] A “MECP2-associated disease,” as used herein, is intended to include any disease associated with the MECP2 gene or protein. Such a disease may be caused, for example, by MECP2 gene mutations, by excess production of the MECP2 protein, by abnormal cleavage of the MECP2 protein, instability of MECP2, by abnormal interactions between MECP2 and other proteins or other endogenous or exogenous substances. In some embodiments, the “MECP2-associated disease” is the Rett syndrome. Rett syndrome is a severe neurodevelopmental disorder caused by loss of function mutations in MECP2, and is characterized by significant developmental impairment in females. Rett syndrome is an X-linked disease, and the affected females are mosaic with 50% of cells expressing a non-functional copy of MECP2 due to X-inactivation. It is characterized by normal early growth and development followed by a slowing of development, loss of purposeful use of the hands, distinctive hand movements, slowed brain and head growth, problems with walking, seizures, and intellectual disability. The course of Rett syndrome, including the age of onset and the severity of symptoms, varies from child to child. Before the symptoms begin, however, the child generally appears to grow and develop normally, although there are often subtle abnormalities even in early infancy, such as loss of muscle tone (hypotonia), difficulty feeding, and jerkiness in limb movements. Then, gradually, mental and physical symptoms appear. As the syndrome progresses, the child loses purposeful use of her hands and the ability to speak. Other early symptoms may include problems crawling or walking and diminished eye contact. The loss of functional use of the hands is followed by compulsive hand movements such as wringing and washing. The onset of this period of regression is sometimes sudden. Apraxia—the inability to perform motor functions—is among the most severely disabling feature of Rett syndrome, interfering with every body movement, including eye gaze and speech. Children with Rett syndrome often exhibit autistic-like behaviors in the early stages. Other symptoms may include walking on the toes, sleep problems, a wide-based gait, teeth grinding and difficulty chewing, slowed growth, seizures, cognitive disabilities, and breathing difficulties while awake such as hyperventilation, apnea (breath holding), and air swallowing (“Rett Syndrome Fact Sheet”. National Institute of Neurological Disorders and Stroke. October 2017). There are generally four stages of Rett syndrome. Stage I, called early onset, typically begins between 6 and 18 months of age. This stage is often overlooked because symptoms of the disorder may be vague, and parents and doctors may not notice the subtle slowing of development at first. This stage usually lasts for a few months but can continue for more than a year. Stage II, or the rapid destructive stage, usually begins between ages 1 and 4 and may last for weeks or months. Its onset may be rapid or gradual as the child loses purposeful hand skills and spoken language. Characteristic hand movements such as wringing, washing, clapping, or tapping, as well as repeatedly moving the hands to the mouth often begin during this stage. Breathing irregularities such as episodes of apnea and hyperventilation may occur, although breathing usually improves during sleep. Some girls also display autistic-like symptoms such as loss of social interaction and communication. Walking may be unsteady and initiating motor movements can be difficult. Slowed head growth is usually noticed during this stage. Stage III, or the plateau or pseudo-stationary stage, usually begins between ages 2 and 10 and can last for years. Apraxia, motor problems, and seizures are prominent during this stage. Stage IV, or the late motor deterioration stage, can last for years or decades. Prominent features include reduced mobility, curvature of the spine (scoliosis) and muscle weakness, rigidity, spasticity, and increased muscle tone with abnormal posturing of an arm, leg, or top part of the body. Repetitive hand movements may decrease and eye gaze usually improves. There are no existing therapies for Rett syndrome.

[0084] As used herein, the term “single nucleotide polymorphisms (SNP),” refers to a variation at a single position in a DNA sequence among individuals. If more than 1% of a population does not carry the same nucleotide at a specific position in the DNA sequence, then this variation can be classified as a SNP. If a SNP occurs within a gene, then the gene is described as having more than one allele. In these cases, SNPs may lead to variations in the amino acid sequence. For example, at a specific base position in the human genome, the C nucleotide can appear in most individuals, but in a minority of individuals, the position is occupied by an A. This means that there is a SNP at this specific position, and the two possible nucleotide variations, C or A, are the two alleles for this position.

[0085] SNPs can fall within coding regions of genes, non-coding regions of genes, or in the intergenic regions (regions between genes). In some embodiments, SNPs within a coding sequence do not necessarily change the amino acid sequence of the protein that is produced, due to degeneracy of the genetic code. SNPs in the coding region are of two types: synonymous and nonsynonymous SNPs. Synonymous SNPs do not affect the protein sequence, while nonsynonymous SNPs change the amino acid sequence of protein. The nonsynonymous SNPs are of two types: missense and nonsense. SNPs that are not in protein-coding regions can still affect gene splicing, transcription factor binding, messenger RNA degradation, or the sequence of noncoding RNA. Gene expression affected by this type of SNP is referred to as an eSNP (expression SNP) and can be upstream or downstream from the gene. A single nucleotide variant is a variation in a single nucleotide without any limitations of frequency and can arise in somatic cells. A somatic single nucleotide variation can also be called a single-nucleotide alteration.

[0086] Although a particular SNP may not cause a disorder, some SNPs are associated with certain diseases. These associations allow for the use of specific SNPs to evaluate an individual's genetic predisposition to develop a disease. In addition, if certain SNPs are known to be associated with a trait, then examination of certain stretches of DNA near these SNPs will help identify the gene or genes responsible for the trait.

[0087] As used herein, the phrase “SNP associated with Rett syndrome” refers to any SNPs that are associated with the onset or development of Rett syndrome. Mutations occur de novo in most Rett syndrome patients, and approximately 40% of patients have 1 of 4 high frequency R>X nonsense mutations. Exemplary SNPs associated with Rett syndrome may include, but are not limited to, any single nucleotide changes in the MECP2 polynucleotide resulting in a premature stop codon at positions 255, 168, 294 and/or 270 of the MECP2 protein. In some embodiments, the SNP associated with Rett syndrome is rs61749721, a SNP commonly referred to as the R255X variant (or mutation) based on the potential change from arginine (encoded by wild type allele) to a premature stop codon (encoded by the rs61749721 allele) at position 255 of the MECP2 protein. In some embodiments, the SNP associated with Rett syndrome is rs61748421, a SNP commonly referred to as the R168X variant (or mutation) based on the potential change from arginine (encoded by rs61748421(C) allele) to a premature stop codon (encoded by the rs61748421(T) allele) at position 168 of the MECP2 protein. In some embodiments, the SNP associated with Rett syndrome is rs61751362, a SNP commonly referred to as the R294X variant (or mutation) based on the potential change from arginine (encoded by rs61751362(C) allele) to a premature stop codon (encoded by the rs61751362(T) allele) at position 294 of the MECP2 protein. In some embodiments, the SNP associated with Rett syndrome is rs61750240, a SNP commonly referred to as the R270X variant (or mutation) based on the potential change from arginine (encoded by rs61750240(C) allele) to a premature stop codon (encoded by the rs61750240(T) allele) at position 270 of the MECP2 protein.

[0088] The term “pathogenic amino acid” refers to any amino acid that is not a wild-type amino acid in a protein and which leads to a pathogenesis.

[0089] The terms “pathogenic mutation”, “pathogenic variant”, “disease causing mutation”, “disease causing variant”, or “deleterious mutation”, refers to a genetic alteration or mutation that increases an individual's susceptibility or predisposition to a certain disease or disorder. In some embodiments, the pathogenic mutation comprises at least one wild-type amino acid substituted by at least one pathogenic amino acid in a protein encoded by a gene. In some embodiments, the pathogenic mutation comprises a missense mutation. In some embodiments, the pathogenic mutation comprises a splice site mutation, e.g., a splice donor variant, or a splice acceptor variant. In some embodiments, the pathogenic mutation comprises a nonsense mutation. In some embodiments, the pathogenic mutation comprises at least one wild-type allele substituted by at least one pathogenic allele in the target gene.

[0090] As used herein, a “premature stop codon” refers to the appearance of a stop codon where there should be a codon corresponding to an amino acid.

[0091] The term “adenosine deaminase”, as used herein, refers to a polypeptide or fragment thereof capable of catalyzing the hydrolytic deamination of adenine or adenosine. In some embodiments, the deaminase or deaminase domain is an adenosine deaminase catalyzing the hydrolytic deamination of adenosine to inosine or deoxy adenosine to deoxyinosine. In some embodiments, the adenosine deaminase catalyzes the hydrolytic deamination of adenine or adenosine in deoxyribonucleic acid (DNA). In some embodiments, the adenosine deaminase catalyzes the hydrolytic deamination of adenine or adenosine in ribonucleic acid (RNA). The adenosine deaminases may be from any organism, such as a human, chimpanzee, gorilla, monkey, cow, dog, rat, or mouse. In some embodiments, the adenosine deaminase is from a bacterium, such as E. coli, S. aureus, S. typhi, S. putrefaciens, H. influenzae, or C. crescentus. In some embodiments, the deaminase or deaminase domain is a variant of a naturally occurring deaminase from an organism, such as a human, chimpanzee, gorilla, monkey, cow, dog, rat, or mouse. In some embodiments, the deaminase or deaminase domain does not occur in nature. For example, in some embodiments, the deaminase or deaminase domain is at least 50%, at least 55%, at least 60%, at least 65%, at least 70%, at least 75% at least 80%, at least 85%, at least 90%, at least 91%, at least 92%, at least 93%, at least 94%, at least 95%, at least 96%, at least 97%, at least 98%, at least 99%, at least 99.1%, at least 99.2%, at least 99.3%, at least 99.4%, at least 99.5%, at least 99.6%, at least 99.7%, at least 99.8%, or at least 99.9% identical to a naturally occurring deaminase. For example, deaminase domains are described in International PCT Application Nos. PCT/2017/045381 (WO 2018/027078) and PCT/US2016/058344 (WO 2017/070632), each of which is incorporated herein by reference for its entirety. Also see Komor, A. C., et al., Nature 533, 420-424 (2016); Gaudelli, N. M., et al., Nature 551, 464-471 (2017); Komor, A. C., et al., Science Advances 3:eaao4774 (2017), and Rees, H. A., et al., Nat Rev Genet. 2018; 19(12):770-788. doi: 10.1038/s41576-018-0059-1, the entire contents of which are hereby incorporated by reference.

[0092] As used herein, the term “Adenosine deaminases acting on RNA (ADAR)” refers to editing enzymes which can recognize certain structural motifs of double-stranded RNA (dsRNA), bind to dsRNA and convert adenosine to inosine through deamination, resulting in recoding of amino acid codons that may lead to changes to the encoded protein and its function. The nucleobases surrounding the editing site, especially the one immediately 5′ of the editing site and one immediately 3′ to the editing site, which together with the editing site are termed the triplet, play an important role in the deamination of adenosine. A preference for U at the 5′ position and G at the 3′ position relative to the editing site, was revealed from the analysis of yeast RNAs efficiently edited by overexpressed human ADAR2 and ADAR1. (See Wang et al., (2018) Biochemistry, 57: 1640-1651; Eifler et al., (2013) Biochemistry, 52: 7857-7869, and Eggington et al., (2011) Nat. Commun., 319: 1-9.) There are three known ADAR proteins expressed in humans, ADAR1, ADAR2, and ADAR3. ADAR1 and ADAR2 are expressed throughout the body, whereas ADAR3 is expressed only in the brain. ADAR1 and ADAR2 are catalytically active, while ADAR3 is thought to be inactive. Recruiting ADAR to specific sites of selected transcripts and deamination of adenosine regardless of neighboring bases holds great promise for the treatment of disease.

[0093] As used herein, the term “ADAR-recruiting domain” refers to nucleotide sequences that may be part of the oligonucleotides of the instant invention and which are able to recruit an ADAR enzyme. For example, such recruiting domains may form stem-loop structures that act as recruitment and binding regions for the ADAR enzyme. Oligonucleotides including such ADAR-recruiting domains may be referred to as “axiomer AONs” or “self-looping AONs.” The ADAR-recruiting domain portion may act to recruit an endogenous ADAR enzyme present in the cell. Such ADAR-recruiting domains do not require conjugated entities or presence of modified recombinant ADAR enzymes. Alternatively, the ADAR-recruiting portion may act to recruit a recombinant ADAR fusion protein that has been delivered to a cell or to a subject via an expression vector construct including a polynucleotide encoding an ADAR fusion protein. Such ADAR-fusion proteins may include the deaminase domain of ADAR1 or ADAR2 enzymes fused to another protein, e.g., to the MS2 bacteriophage coat protein. An ADAR-recruiting domain may be a nucleotide sequence based on a natural substrate (e.g., the GluR2 receptor pre-mRNA; such as a GluR2 ADAR-recruiting domain), a Z-DNA structure, or a domain known to recruit another protein which is part of an ADAR fusion protein, e.g., an MS2 ADAR-recruiting domain known to be recognized by the dsRNA binding regions of ADAR. A stem-loop structure of an ADAR-recruiting domain can be an intermolecular stem-loop structure, formed by two separate nucleic acid strands, or an intramolecular stem loop structure, formed within a single nucleic acid strand.

[0094] As used herein, the term “Z-DNA” refers to a left-handed conformation of the DNA double helix or RNA stem loop structures. Such DNA or dsRNA helices wind to the left in a zigzag pattern (as opposed to the right, like the more commonly found B-DNA form). Z-DNA is a known high-affinity ADAR binding substrate and has been shown to bind to human ADAR1 enzyme.

[0095] “G,” “C,” “A,” “T,” and “U” each generally stand for a naturally-occurring nucleotide that contains guanine, cytosine, adenine, thymidine, and uracil as a base, respectively. However, it will be understood that the term “nucleotide” can also refer to an alternative nucleotide, as further detailed below, or a surrogate replacement moiety. The skilled person is well aware that guanine, cytosine, adenine, and uracil can be replaced by other moieties without substantially altering the base pairing properties of an oligonucleotide including a nucleotide bearing such replacement moiety. For example, without limitation, a nucleotide including hypoxanthine as its base can base pair with nucleotides containing adenine, cytosine, or uracil. Hence, nucleotides containing uracil, guanine, or adenine can be replaced in the nucleotide sequences of oligonucleotides featured in the invention by a nucleotide containing, for example, hypoxanthine. In another example, adenine and cytosine anywhere in the oligonucleotide can be replaced with guanine and uracil, respectively to form G-U wobble base pairing with the target mRNA. Sequences containing such replacement moieties are suitable for the compositions and methods featured in the invention.

[0096] The terms “nucleobase” and “base” include the purine (e.g., adenine and guanine) and pyrimidine (e.g., uracil, thymine, and cytosine) moiety present in nucleosides and nucleotides which form hydrogen bonds in nucleic acid hybridization. In the context of the present invention, the term nucleobase also encompasses alternative nucleobases which may differ from naturally-occurring nucleobases but are functional during nucleic acid hybridization. In this context “nucleobase” refers to both naturally occurring nucleobases such as adenine, guanine, cytosine, thymidine, uracil, xanthine, and hypoxanthine, as well as alternative nucleobases. Such variants are, for example, described in Hirao et al (2012) Accounts of Chemical Research vol 45, page 2055 and Bergstrom (2009) Current Protocols in Nucleic Acid Chemistry Suppl. 37 Chapter 1, unit 4.1.

[0097] In a some embodiments the nucleobase moiety is modified by changing the purine or pyrimidine into a modified purine or pyrimidine, such as substituted purine or substituted pyrimidine, such as an “alternative nucleobase” selected from isocytosine, pseudoisocytosine, 5-methylcytosine, 5-thiozolo-cytosine, 5-propynyl-cytosine, 5-propynyl-uracil, 5-bromouracil, 5-thiazolo-uracil, 2-thio-uracil, pseudouracil, 1-methylpseudouracil, 5-methoxyuracil, 2′-thio-thymine, hypoxanthine, diaminopurine, 6-aminopurine, 2-aminopurine, 2,6-diaminopurine, and 2-chloro-6-aminopurine.

[0098] The nucleobase moieties may be indicated by the letter code for each corresponding nucleobase, e.g. A, T, G, C, or U, wherein each letter may optionally include alternative nucleobases of equivalent function.

[0099] A “sugar” or “sugar moiety,” includes naturally occurring sugars having a furanose ring. A sugar also includes an “alternative sugar,” defined as a structure that is capable of replacing the furanose ring of a nucleoside. In certain embodiments, alternative sugars are non-furanose (or 4′-substituted furanose) rings or ring systems or open systems. Such structures include simple changes relative to the natural furanose ring, such as a six-membered ring, or may be more complicated as is the case with the non-ring system used in peptide nucleic acid. Alternative sugars may also include sugar surrogates wherein the furanose ring has been replaced with another ring system such as, for example, a morpholino or hexitol ring system. Sugar moieties useful in the preparation of oligonucleotides having motifs include, without limitation, β-D-ribose, β-D-2′-deoxyribose, substituted sugars (such as 2′, 5′ and bis substituted sugars), 4′-S-sugars (such as 4′-S-ribose, 4′-S-2′-deoxyribose and 4′-S-2′-substituted ribose), bicyclic alternative sugars (such as the 2′-O—CH₂-4′ or 2′-O—(CH₂)₂-4′ bridged ribose derived bicyclic sugars) and sugar surrogates (such as when the ribose ring has been replaced with a morpholino or a hexitol ring system). The type of heterocyclic base and internucleoside linkage used at each position is variable and is not a factor in determining the motif. In most nucleosides having an alternative sugar moiety, the heterocyclic nucleobase is generally maintained to permit hybridization.

[0100] A “nucleotide,” as used herein refers to a monomeric unit of an oligonucleotide or polynucleotide that includes a nucleoside and an internucleoside linkage. The internucleoside linkage may or may not include a phosphate linkage. Similarly, “linked nucleosides” may or may not be linked by phosphate linkages. Many “alternative internucleoside linkages” are known in the art, including, but not limited to, phosphorothioate and boronophosphate linkages. Alternative nucleosides include bicyclic nucleosides (BNAs) (e.g., locked nucleosides (LNAs) and constrained ethyl (cEt) nucleosides), peptide nucleosides (PNAs), phosphotriesters, phosphorothionates, phosphoramidates, and other variants of the phosphate backbone of native nucleoside, including those described herein.

[0101] An “alternative nucleotide” as used herein, refers to a nucleotide having an alternative nucleobase or an alternative sugar, and an internucleoside linkage, which may include alternative nucleoside linkages.

[0102] The term “nucleoside” refers to a monomeric unit of an oligonucleotide or a polynucleotide having a nucleobase and a sugar moiety. A nucleoside may include those that are naturally-occurring as well as alternative nucleosides, such as those described herein. The nucleobase of a nucleoside may be a naturally-occurring nucleobase or an alternative nucleobase. Similarly, the sugar moiety of a nucleoside may be a naturally-occurring sugar or an alternative sugar.

[0103] The term “alternative nucleoside” refers to a nucleoside having an alternative sugar or an alternative nucleobase, such as those described herein.

[0104] The term “nuclease resistant nucleotide” as used herein refers to nucleotides which limit nuclease degradation of oligonucleotides. Nuclease resistant nucleotides generally increase stability of oligonucleotides by being poor substrates for the nucleases. Nuclease resistant nucleotides are known in the art, e.g., 2′-O-methyl-nucleotides and 2′-fluoro-nucleotides.

[0105] The terms “oligonucleotide” and “polynucleotide” as used herein, are defined as it is generally understood by the skilled person as a molecule including two or more covalently linked nucleosides. Such covalently bound nucleosides may also be referred to as nucleic acid molecules or oligomers. Oligonucleotides are commonly made in the laboratory by solid-phase chemical synthesis followed by purification. When referring to a sequence of the oligonucleotide, reference is made to the sequence or order of nucleobase moieties, or modifications thereof, of the covalently linked nucleotides or nucleosides. The oligonucleotide of the invention may be man-made, and is chemically synthesized, and is typically purified or isolated. Oligonucleotide is also intended to include (i) compounds that have one or more furanose moieties that are replaced by furanose derivatives or by any structure, cyclic or acyclic, that may be used as a point of covalent attachment for the base moiety, (ii) compounds that have one or more phosphodiester linkages that are either modified, as in the case of phosphoramidate or phosphorothioate linkages, or completely replaced by a suitable linking moiety as in the case of formacetal or riboacetal linkages, and/or (iii) compounds that have one or more linked furanose-phosphodiester linkage moieties replaced by any structure, cyclic or acyclic, that may be used as a point of covalent attachment for the base moiety. The oligonucleotide of the invention may include one or more alternative nucleosides or nucleotides (e.g., including those described herein). It is also understood that oligonucleotide includes compositions lacking a sugar moiety or nucleobase but is still capable of forming a pairing with or hybridizing to a target sequence.

[0106] “Oligonucleotide” refers to a short polynucleotide (e.g., of 100 or fewer linked nucleosides).

[0107] The phrases “an oligonucleotide that is capable of effecting an adenosine deaminase acting on RNA (ADAR)-mediated adenosine to inosine alteration” or “a guide oligonucleotide that is capable of effecting an ADAR-mediated adenosine to inosine alteration” refer to an oligonucleotide that is specific for a target sequence and is capable to be utilized for the deamination reaction of a specific adenosine in a target sequence through an ADAR-mediated pathway. The oligonucleotide may comprise a nucleic acid sequence complementary to a target sequence, e.g., a MECP2 mRNA sequence comprising the SNP associated with Rett syndrome. In some embodiments, the oligonucleotides may comprise a nucleic acid sequence complementary to target mRNA with the exception of at least one mismatch. The oligonucleotide includes a mismatch opposite the target adenosine. In some embodiments, the oligonucleotides for use in the methods of the present invention do not include those used by any other gene editing technologies known in the art, e.g., CRISPR.

[0108] The oligonucleotide may be of any length, and may range from about 10-100 bases in length, e.g., about 15-100 bases in length or about 18-100 bases in length, for example, about 10, 11, 12, 13, 14, 15, 16, 17, 18, 19, 20, 21, 22, 23, 24, 25, 26, 27, 28, 29, 30, 31, 32, 33, 34, 35, 36, 37, 38, 39, 40, 41, 42, 43, 44, 45, 46, 47, 48, 49, 50, 51, 52, 53, 54, 55, 56, 57, 58, 59, 60, 61, 62, 63, 64, 65, 66, 67, 68, 69, 70, 71, 72, 73, 74, 75, 76, 77, 78, 79, 80, 81, 82, 83, 84, 85, 86, 87, 88, 89, 90, 91, 92, 93, 94, 95, 96, 97, 98, 99, or 100 bases in length, such as about 15-50, 15-49, 15-48, 15-47, 15-46, 15-45, 15-44, 15-43, 15-42, 15-41, 15-40, 15-39, 15-38, 15-37, 15-36, 15-35, 15-34, 15-33, 15-32, 15-31, 15-31, 15-30, 18-50, 18-49, 18-48, 18-47, 18-46, 18-45, 18-44, 18-43, 18-42, 18-41, 18-40, 18-39, 18-38, 18-37, 18-36, 18-35, 18-34, 18-33, 18-32, 18-31, 18-31, 18-30, 19-50, 19-49, 19-48, 19-47, 19-46, 19-45, 19-44, 19-43, 19-42, 19-41, 19-40, 19-39, 19-38, 19-37, 19-36, 19-35, 19-34, 19-33, 19-32, 19-31, 19-31, 19-30, 20-50, 20-49, 20-48, 20-47, 20-46, 20-45, 20-44,20-43, 20-42, 20-41, 20-40, 20-39, 20-38, 20-37, 20-36, 20-35, 20-34, 20-33, 20-32, 20-31, 20-31, 20-30, 21-50, 21-49, 21-48, 21-47, 21-46, 21-45, 21-44, 21-43, 21-42, 21-41, 21-40, 21-39, 21-38, 21-37, 21-36, 21-35, 21-34, 21-33, 21-32, 21-31, 21-31, or 21-30 bases in length. Ranges and lengths intermediate to the above recited ranges and lengths are also contemplated to be part of the invention.

[0109] The term “linker” or “linking group” is a connection between two atoms that links one chemical group or segment of interest to another chemical group or segment of interest via one or more covalent bonds. Conjugate moieties can be attached to the oligonucleotide directly or through a linking moiety (e.g. linker or tether). Linkers serve to covalently connect a third region, e.g. a conjugate moiety to an oligonucleotide (e.g. the termini of region A or C). In some embodiments of the invention the conjugate or oligonucleotide conjugate of the invention may optionally, include a linker region which is positioned between the oligonucleotide and the conjugate moiety. In some embodiments, the linker between the conjugate and oligonucleotide is biocleavable. Phosphodiester containing biocleavable linkers are described in more detail in WO 2014/076195 (herein incorporated by reference).

[0110] “Complementary” polynucleotides are those that are capable of base pairing according to the standard Watson-Crick complementarity rules. Specifically, purines will base pair with pyrimidines to form a combination of guanine paired with cytosine (G:C) and adenine paired with either thymine (A:T) in the case of DNA, or adenine paired with uracil (A:U) in the case of RNA. It is understood that two polynucleotides may hybridize to each other even if they are not completely complementary to each other, provided that each has at least one region that is substantially complementary to the other. Complementary sequences between an oligonucleotide and a target sequence as described herein, include base-pairing of the oligonucleotide or polynucleotide including a first nucleotide sequence to an oligonucleotide or polynucleotide including a second nucleotide sequence over the entire length of one or both nucleotide sequences. Such sequences can be referred to as “fully complementary” with respect to each other herein. However, where a first sequence is referred to as “substantially complementary” with respect to a second sequence herein, the two sequences can be fully complementary, or they can form one or more, but generally no more than 5, 4, 3 or 2 mismatched base pairs upon hybridization for a duplex up to 30 base pairs, while retaining the ability to hybridize under the conditions most relevant to their ultimate application, e.g., deamination of an adenosine. “Substantially complementary” can also refer to a polynucleotide that is substantially complementary to a contiguous portion of the mRNA of interest (e.g., an mRNA having a target adenosine). For example, a polynucleotide is complementary to at least a part of the mRNA of interest if the sequence is substantially complementary to a non-interrupted portion of the mRNA of interest. In some embodiments, the oligonucleotide, as described herein, is at least 50%, at least 55%, at least 60%, at least 65%, at least 70%, at least 75% at least 80%, at least 85%, at least 90%, at least 91%, at least 92%, at least 93%, at least 94%, at least 95%, at least 96%, at least 97%, at least 98%, at least 99%, at least 99.1%, at least 99.2%, at least 99.3%, at least 99.4%, at least 99.5%, at least 99.6%, at least 99.7%, at least 99.8%, or at least 99.9% complementary to the target sequence.

[0111] As used herein, and unless otherwise indicated, the term “complementary,” when used to describe a first nucleotide or nucleoside sequence in relation to a second nucleotide or nucleoside sequence, refers to the ability of an oligonucleotide or polynucleotide including the first nucleotide or nucleoside sequence to hybridize and form a duplex structure under certain conditions with an oligonucleotide or polynucleotide including the second nucleotide sequence, as will be understood by the skilled person. Such conditions can, for example, be stringent conditions, where stringent conditions can include: 400 mM NaCl, 40 mM PIPES pH 6.4, 1 mM EDTA, 50° C., or 70° C., for 12-16 hours followed by washing (see, e.g., “Molecular Cloning: A Laboratory Manual, Sambrook, et al. (1989) Cold Spring Harbor Laboratory Press). Other conditions, such as physiologically relevant conditions as can be encountered inside an organism, can apply. The skilled person will be able to determine the set of conditions most appropriate for a test of complementarity of two sequences in accordance with the ultimate application of the hybridized nucleotides or nucleosides.

[0112] As used herein, the terms “variant” and “derivative” are used interchangeably and refer to naturally-occurring, synthetic, and semi-synthetic analogues of a compound, peptide, protein, or other substance described herein. A variant or derivative of a compound, peptide, protein, or other substance described herein may retain or improve upon the biological activity of the original material.

[0113] The term“mutation,” as used herein, refers to a substitution of a residue within a sequence, e.g., a nucleic acid or amino acid sequence, with another residue, or a deletion or insertion of one or more residues within a sequence. Mutations are typically described herein by identifying the original residue followed by the position of the residue within the sequence and by the identity of the newly substituted residue. Various methods for making the amino acid substitutions (mutations) provided herein are well known in the art, and are provided by, for example, Green and Sambrook, Molecular Cloning: A Laboratory Manual (4th ed., Cold Spring Harbor Laboratory Press, Cold Spring Harbor, N.Y. (2012)). In some embodiments, the presently disclosed compositions can efficiently generate an“intended mutation”, such as a point mutation, in a nucleic acid (e.g., a nucleic acid within a genome of a subject) without generating a significant number of unintended mutations, such as unintended point mutations. In some embodiments, an intended mutation is a mutation that is generated by a specific guide oligonucleotide, specifically designed to generate the intended mutation. In general, mutations made or identified in a sequence (e.g., an amino acid sequence as described herein) are numbered in relation to a reference (or wild type) sequence, i.e., a sequence that does not contain the mutations. The skilled practitioner in the art would readily understand how to determine the position of mutations in amino acid and nucleic acid sequences relative to a reference sequence.

[0114] The term “contacting,” as used herein, includes contacting a target gene, e.g., MECP2 by any means. In some embodiments, a target gene is contacted with a guide oligonucleotide in a cell. Contacting a MECP2 polynucleotide in a cell with a guide oligonucleotide includes contacting the MECP2 polynucleotide in a cell in vitro with the guide oligonucleotide or contacting the MECP2 polynucleotide in a cell in vivo with the guide oligonucleotide.

[0115] Contacting a cell in vitro may be done, for example, by incubating the cell with the guide oligonucleotide. Contacting a cell in vivo may be done, for example, by injecting the guide oligonucleotide into or near the tissue where the cell is located, or by injecting the guide oligonucleotide agent into another area, e.g., the bloodstream or the subcutaneous space, such that the agent will subsequently reach the tissue where the cell to be contacted is located. For example, the guide oligonucleotide may contain and/or be coupled to a ligand that directs the oligonucleotide to a site of interest. Combinations of in vitro and in vivo methods of contacting are also possible. For example, a cell may also be contacted in vitro with a guide oligonucleotide and subsequently transplanted into a subject.

[0116] In one embodiment, contacting a cell with a guide oligonucleotide includes “introducing” or “delivering the oligonucleotide into the cell” by facilitating or effecting uptake or absorption into the cell. Absorption or uptake of a guide oligonucleotide can occur through unaided diffusive or active cellular processes, or by auxiliary agents or devices. Introducing a guide oligonucleotide into a cell may be in vitro and/or in vivo. For example, for in vivo introduction, oligonucleotides can be injected into a tissue site or administered systemically. In vitro introduction into a cell includes methods known in the art such as electroporation and lipofection. Further approaches are described herein below and/or are known in the art.

[0117] As used herein, “lipid nanoparticle” or “LNP” is a vesicle including a lipid layer encapsulating a pharmaceutically active molecule, such as a nucleic acid molecule, e.g., an oligonucleotide. LNP refers to a stable nucleic acid-lipid particle. LNPs typically contain a cationic, ionizable lipid, a non-cationic lipid, and a lipid that prevents aggregation of the particle (e.g., a PEG-lipid conjugate). LNPs are described in, for example, U.S. Pat. Nos. 6,858,225; 6,815,432; 8,158,601; and 8,058,069, the entire contents of which are hereby incorporated herein by reference.

[0118] As used herein, the term “liposome” refers to a vesicle composed of amphiphilic lipids arranged in at least one bilayer, e.g., one bilayer or a plurality of bilayers. Liposomes include unilamellar and multilamellar vesicles that have a membrane formed from a lipophilic material and an aqueous interior. The aqueous portion contains the oligonucleotide composition. The lipophilic material isolates the aqueous interior from an aqueous exterior, which typically does not include the oligonucleotide composition, although in some examples, it may. Liposomes also include “sterically stabilized” liposomes, a term which, as used herein, refers to liposomes including one or more specialized lipids that, when incorporated into liposomes, result in enhanced circulation lifetimes relative to liposomes lacking such specialized lipids.

[0119] “Micelles” are defined herein as a particular type of molecular assembly in which amphipathic molecules are arranged in a spherical structure such that all the hydrophobic portions of the molecules are directed inward, leaving the hydrophilic portions in contact with the surrounding aqueous phase. The converse arrangement exists if the environment is hydrophobic.

[0120] By “determining the level of a protein” is meant the detection of a protein, or an mRNA encoding the protein, by methods known in the art either directly or indirectly. “Directly determining” means performing a process (e.g., performing an assay or test on a sample or “analyzing a sample” as that term is defined herein) to obtain the physical entity or value. “Indirectly determining” refers to receiving the physical entity or value from another party or source (e.g., a third-party laboratory that directly acquired the physical entity or value). Methods to measure protein level generally include, but are not limited to, western blotting, immunoblotting, enzyme-linked immunosorbent assay (ELISA), radioimmunoassay (RIA), immunoprecipitation, immunofluorescence, surface plasmon resonance, chemiluminescence, fluorescent polarization, phosphorescence, immunohistochemical analysis, matrix-assisted laser desorption/ionization time-of-flight (MALDI-TOF) mass spectrometry, liquid chromatography (LC)-mass spectrometry, microcytometry, microscopy, fluorescence activated cell sorting (FACS), and flow cytometry, as well as assays based on a property of a protein including, but not limited to, enzymatic activity or interaction with other protein partners. Methods to measure mRNA levels are known in the art.

[0121] “Percent (%) sequence identity” with respect to a reference polynucleotide or polypeptide sequence is defined as the percentage of nucleic acids or amino acids in a candidate sequence that are identical to the nucleic acids or amino acids in the reference polynucleotide or polypeptide sequence, after aligning the sequences and introducing gaps, if necessary, to achieve the maximum percent sequence identity. Alignment for purposes of determining percent nucleic acid or amino acid sequence identity can be achieved in various ways that are within the capabilities of one of skill in the art, for example, using publicly available computer software such as BLAST, BLAST-2, or Megalign software. Those skilled in the art can determine appropriate parameters for aligning sequences, including any algorithms needed to achieve maximal alignment over the full length of the sequences being compared. For example, percent sequence identity values may be generated using the sequence comparison computer program BLAST. As an illustration, the percent sequence identity of a given nucleic acid or amino acid sequence, A, to, with, or against a given nucleic acid or amino acid sequence, B, (which can alternatively be phrased as a given nucleic acid or amino acid sequence, A that has a certain percent sequence identity to, with, or against a given nucleic acid or amino acid sequence, B) is calculated as follows:

100 multiplied by (the fraction X/Y)

[0122] where X is the number of nucleotides or amino acids scored as identical matches by a sequence alignment program (e.g., BLAST) in that program's alignment of A and B, and where Y is the total number of nucleic acids in B. It will be appreciated that where the length of nucleic acid or amino acid sequence A is not equal to the length of nucleic acid or amino acid sequence B, the percent sequence identity of A to B will not equal the percent sequence identity of B to A.

[0123] By “level” is meant a level or activity of a protein, or mRNA encoding the protein, as compared to a reference. The reference can be any useful reference, as defined herein. By a “decreased level” or an “increased level” of a protein is meant a decrease or increase in protein level, as compared to a reference (e.g., a decrease or an increase by about 5%, about 10%, about 15%, about 20%, about 25%, about 30%, about 35%, about 40%, about 45%, about 50%, about 55%, about 60%, about 65%, about 70%, about 75%, about 80%, about 85%, about 90%, about 95%, about 100%, about 150%, about 200%, about 300%, about 400%, about 500%, or more; a decrease or an increase of more than about 10%, about 15%, about 20%, about 50%, about 75%, about 100%, or about 200%, as compared to a reference; a decrease or an increase by less than about 0.01-fold, about 0.02-fold, about 0.1-fold, about 0.3-fold, about 0.5-fold, about 0.8-fold, or less; or an increase by more than about 1.2-fold, about 1.4-fold, about 1.5-fold, about 1.8-fold, about 2-fold, about 3-fold, about 3.5-fold, about 4.5-fold, about 5-fold, about 10-fold, about 15-fold, about 20-fold, about 30-fold, about 40-fold, about 50-fold, about 100-fold, about 1000-fold, or more). A level of a protein may be expressed in mass/vol (e.g., g/dL, mg/mL, g/mL, ng/mL) or percentage relative to total protein or mRNA in a sample.

[0124] The term “pharmaceutical composition,” as used herein, represents a composition containing a compound described herein formulated with a pharmaceutically acceptable excipient, and preferably manufactured or sold with the approval of a governmental regulatory agency as part of a therapeutic regimen for the treatment of disease in a mammal. Pharmaceutical compositions can be formulated, for example, for oral administration in unit dosage form (e.g., a tablet, capsule, caplet, gelcap, or syrup); for topical administration (e.g., as a cream, gel, lotion, or ointment); for intravenous administration (e.g., as a sterile solution free of particulate emboli and in a solvent system suitable for intravenous use); for intrathecal injection; for intracerebroventricular injections; for intraparenchymal injection; or in any other pharmaceutically acceptable formulation.

[0125] A “pharmaceutically acceptable excipient,” as used herein, refers any ingredient other than the compounds described herein (for example, a vehicle capable of suspending or dissolving the active compound) and having the properties of being substantially nontoxic and non-inflammatory in a patient. Excipients may include, for example: antiadherents, antioxidants, binders, coatings, compression aids, disintegrants, dyes (colors), emollients, emulsifiers, fillers (diluents), film formers or coatings, flavors, fragrances, glidants (flow enhancers), lubricants, preservatives, printing inks, sorbents, suspensing or dispersing agents, sweeteners, and waters of hydration. Exemplary excipients include, but are not limited to: butylated hydroxytoluene (BHT), calcium carbonate, calcium phosphate (dibasic), calcium stearate, croscarmellose, crosslinked polyvinyl pyrrolidone, citric acid, crospovidone, cysteine, ethylcellulose, gelatin, hydroxypropyl cellulose, hydroxypropyl methylcellulose, lactose, magnesium stearate, maltitol, mannitol, methionine, methylcellulose, methyl paraben, microcrystalline cellulose, polyethylene glycol, polyvinyl pyrrolidone, povidone, pregelatinized starch, propyl paraben, retinyl palmitate, shellac, silicon dioxide, sodium carboxymethyl cellulose, sodium citrate, sodium starch glycolate, sorbitol, starch (corn), stearic acid, sucrose, talc, titanium dioxide, vitamin A, vitamin E, vitamin C, and xylitol.

[0126] As used herein, the term “pharmaceutically acceptable salt” means any pharmaceutically acceptable salt of the compound of any of the compounds described herein. For example, pharmaceutically acceptable salts of any of the compounds described herein include those that are within the scope of sound medical judgment, suitable for use in contact with the tissues of humans and animals without undue toxicity, irritation, allergic response and are commensurate with a reasonable benefit/risk ratio. Pharmaceutically acceptable salts are well known in the art. For example, pharmaceutically acceptable salts are described in: Berge et al., J. Pharmaceutical Sciences 66:1-19, 1977 and in Pharmaceutical Salts: Properties, Selection, and Use, (Eds. P. H. Stahl and C. G. Wermuth), Wiley-VCH, 2008. The salts can be prepared in situ during the final isolation and purification of the compounds described herein or separately by reacting a free base group with a suitable organic acid.

[0127] The compounds described herein may have ionizable groups so as to be capable of preparation as pharmaceutically acceptable salts. These salts may be acid addition salts involving inorganic or organic acids or the salts may, in the case of acidic forms of the compounds described herein, be prepared from inorganic or organic bases. Frequently, the compounds are prepared or used as pharmaceutically acceptable salts prepared as addition products of pharmaceutically acceptable acids or bases. Suitable pharmaceutically acceptable acids and bases and methods for preparation of the appropriate salts are well-known in the art. Salts may be prepared from pharmaceutically acceptable non-toxic acids and bases including inorganic and organic acids and bases. Representative acid addition salts include acetate, adipate, alginate, ascorbate, aspartate, benzenesulfonate, benzoate, bisulfate, borate, butyrate, camphorate, camphorsulfonate, citrate, cyclopentanepropionate, digluconate, dodecylsulfate, ethanesulfonate, fumarate, glucoheptonate, glycerophosphate, hemisulfate, heptonate, hexanoate, hydrobromide, hydrochloride, hydroiodide, 2-hydroxy-ethanesulfonate, lactobionate, lactate, laurate, lauryl sulfate, malate, maleate, malonate, methanesulfonate, 2-naphthalenesulfonate, nicotinate, nitrate, oleate, oxalate, palmitate, pamoate, pectinate, persulfate, 3-phenylpropionate, phosphate, picrate, pivalate, propionate, stearate, succinate, sulfate, tartrate, thiocyanate, toluenesulfonate, undecanoate, and valerate salts. Representative alkali or alkaline earth metal salts include sodium, lithium, potassium, calcium, and magnesium, as well as nontoxic ammonium, quaternary ammonium, and amine cations, including, but not limited to ammonium, tetramethylammonium, tetraethylammonium, methylamine, dimethylamine, trimethylamine, triethylamine, and ethylamine.

[0128] By a “reference” is meant any useful reference used to compare protein or mRNA levels or activity. The reference can be any sample, standard, standard curve, or level that is used for comparison purposes. The reference can be a normal reference sample or a reference standard or level. A “reference sample” can be, for example, a control, e.g., a predetermined negative control value such as a “normal control” or a prior sample taken from the same subject; a sample from a normal healthy subject, such as a normal cell or normal tissue; a sample (e.g., a cell or tissue) from a subject not having a disease; a sample from a subject that is diagnosed with a disease, but not yet treated with a compound described herein; a sample from a subject that has been treated by a compound described herein; or a sample of a purified protein (e.g., any described herein) at a known normal concentration. By “reference standard or level” is meant a value or number derived from a reference sample. A “normal control value” is a pre-determined value indicative of non-disease state, e.g., a value expected in a healthy control subject. Typically, a normal control value is expressed as a range (“between X and Y”), a high threshold (“no higher than X”), or a low threshold (“no lower than X”). A subject having a measured value within the normal control value for a particular biomarker is typically referred to as “within normal limits” for that biomarker. A normal reference standard or level can be a value or number derived from a normal subject not having a disease or disorder; a subject that has been treated with a compound described herein. In preferred embodiments, the reference sample, standard, or level is matched to the sample subject sample by at least one of the following criteria: age, weight, sex, disease stage, and overall health. A standard curve of levels of a purified protein, e.g., any described herein, within the normal reference range can also be used as a reference.

[0129] As used herein, the term “subject” refers to any organism to which a composition in accordance with the invention may be administered, e.g., for experimental, diagnostic, prophylactic, and/or therapeutic purposes. Typical subjects include any animal (e.g., mammals such as mice, rats, rabbits, non-human primates, and humans). A subject may seek or be in need of treatment, require treatment, be receiving treatment, be receiving treatment in the future, or be a human or animal who is under care by a trained professional for a particular disease or condition.

[0130] As used herein, the term “administration” refers to the administration of a composition (e.g., a compound or a preparation that includes a compound as described herein) to a subject or system. Administration to an animal subject (e.g., to a human) may be by any appropriate route, such as the one described herein.

[0131] As used herein, a “combination therapy” or “administered in combination” means that two (or more) different agents or treatments are administered to a subject as part of a defined treatment regimen for a particular disease or condition. The treatment regimen defines the doses and periodicity of administration of each agent such that the effects of the separate agents on the subject overlap. In some embodiments, the delivery of the two or more agents is simultaneous or concurrent and the agents may be co-formulated. In some embodiments, the two or more agents are not co-formulated and are administered in a sequential manner as part of a prescribed regimen. In some embodiments, administration of two or more agents or treatments in combination is such that the reduction in a symptom, or other parameter related to the disorder is greater than what would be observed with one agent or treatment delivered alone or in the absence of the other. The effect of the two treatments can be partially additive, wholly additive, or greater than additive (e.g., synergistic). Sequential or substantially simultaneous administration of each therapeutic agent can be effected by any appropriate route including, but not limited to, oral routes, intravenous routes, intramuscular routes, and direct absorption through mucous membrane tissues. The therapeutic agents can be administered by the same route or by different routes. For example, a first therapeutic agent of the combination may be administered by intravenous injection while a second therapeutic agent of the combination may be administered orally.

[0132] As used herein, the terms “treat,” “treated,” or “treating” mean both therapeutic treatment and prophylactic or preventative measures wherein the object is to prevent or slow down (lessen) an undesired physiological condition, disorder, or disease, or obtain beneficial or desired clinical results. Beneficial or desired clinical results include, but are not limited to, alleviation of symptoms; diminishment of the extent of a condition, disorder, or disease; stabilized (i.e., not worsening) state of condition, disorder, or disease; delay in onset or slowing of condition, disorder, or disease progression; amelioration of the condition, disorder, or disease state or remission (whether partial or total), whether detectable or undetectable; an amelioration of at least one measurable physical parameter, not necessarily discernible by the patient; or enhancement or improvement of condition, disorder, or disease. Treatment includes eliciting a clinically significant response without excessive levels of side effects. Treatment also includes prolonging survival as compared to expected survival if not receiving treatment.

[0133] As used herein, the terms “effective amount,” “therapeutically effective amount,” and “a “sufficient amount” of an agent that results in a therapeutic effect (e.g., in a cell or a subject) described herein refer to a quantity sufficient to, when administered to the subject, including a human, effect beneficial or desired results, including clinical results, and, as such, an “effective amount” or synonym thereto depends on the context in which it is being applied. For example, in the context of treating a disorder, it is an amount of the agent that is sufficient to achieve a treatment response as compared to the response obtained without administration. The amount of a given agent will vary depending upon various factors, such as the given agent, the pharmaceutical formulation, the route of administration, the type of disease or disorder, the identity of the subject (e.g., age, sex, and/or weight) or host being treated, and the like, but can nevertheless be routinely determined by one of skill in the art. Also, as used herein, a “therapeutically effective amount” of an agent is an amount which results in a beneficial or desired result in a subject as compared to a control. As defined herein, a therapeutically effective amount of an agent may be readily determined by one of ordinary skill by routine methods known in the art. Dosage regimen may be adjusted to provide the optimum therapeutic response.

[0134] “Prophylactically effective amount,” as used herein, is intended to include the amount of an oligonucleotide that, when administered to a subject having or predisposed to have a disorder, is sufficient to prevent or ameliorate the disease or one or more symptoms of the disease. Ameliorating the disease includes slowing the course of the disease or reducing the severity of later-developing disease. The “prophylactically effective amount” may vary depending on the oligonucleotide, how the agent is administered, the degree of risk of disease, and the history, age, weight, family history, genetic makeup, the types of preceding or concomitant treatments, if any, and other individual characteristics of the patient to be treated.

[0135] A “therapeutically-effective amount” or “prophylactically effective amount” also includes an amount (either administered in a single or in multiple doses) of an oligonucleotide that produces some desired local or systemic effect at a reasonable benefit/risk ratio applicable to any treatment. Oligonucleotides employed in the methods of the present invention may be administered in a sufficient amount to produce a reasonable benefit/risk ratio applicable to such treatment.

[0136] A prophylactically effective amount may also refer to, for example, an amount sufficient to, when administered to the subject, including a human, to delay the onset of one or more of the disorders described herein by at least 120 days, for example, at least 6 months, at least 12 months, at least 2 years, at least 3 years, at least 4 years, at least 5 years, at least 10 years or more, when compared with the predicted onset.

[0137] For any of the following chemical definitions, a number following an atomic symbol indicates that total number of atoms of that element that are present in a particular chemical moiety. As will be understood, other atoms, such as H atoms, or substituent groups, as described herein, may be present, as necessary, to satisfy the valences of the atoms. For example, an unsubstituted C₂ alkyl group has the formula —CH₂CH₃. When used with the groups defined herein, a reference to the number of carbon atoms includes the divalent carbon in acetal and ketal groups but does not include the carbonyl carbon in acyl, ester, carbonate, or carbamate groups. A reference to the number of oxygen, nitrogen, or sulfur atoms in a heteroaryl group only includes those atoms that form a part of a heterocyclic ring.

[0138] When a particular substituent may be present multiple times in the same structure, each instance of the substituent may be independently selected from the list of possible definitions for that substituent.

[0139] The term “alkyl,” as used herein, refers to a branched or straight-chain monovalent saturated aliphatic hydrocarbon radical of 1 to 20 carbon atoms (e.g., 1 to 16 carbon atoms, 1 to 10 carbon atoms, 1 to 6 carbon atoms, or 1 to 3 carbon atoms).

[0140] An alkylene is a divalent alkyl group. The term “alkenyl,” as used herein, alone or in combination with other groups, refers to a straight chain or branched hydrocarbon residue having a carbon-carbon double bond and having 2 to 20 carbon atoms (e.g., 2 to 16 carbon atoms, 2 to 10 carbon atoms, 2 to 6 carbon atoms, or 2 carbon atoms).

[0141] The term “halogen,” as used herein, means a fluorine (fluoro), chlorine (chloro), bromine (bromo), or iodine (iodo) radical.

[0142] The term “heteroalkyl,” as used herein, refers to an alkyl group, as defined herein, in which one or more of the constituent carbon atoms have been replaced by nitrogen, oxygen, or sulfur. In some embodiments, the heteroalkyl group can be further substituted with 1, 2, 3, or 4 substituent groups as described herein for alkyl groups. Examples of heteroalkyl groups are an “alkoxy” which, as used herein, refers alkyl-O— (e.g., methoxy and ethoxy). A heteroalkylene is a divalent heteroalkyl group. The term “heteroalkenyl,” as used herein, refers to an alkenyl group, as defined herein, in which one or more of the constituent carbon atoms have been replaced by nitrogen, oxygen, or sulfur. In some embodiments, the heteroalkenyl group can be further substituted with 1, 2, 3, or 4 substituent groups as described herein for alkenyl groups. Examples of heteroalkenyl groups are an “alkenoxy” which, as used herein, refers alkenyl-O—. A heteroalkenylene is a divalent heteroalkenyl group. The term “heteroalkynyl,” as used herein, refers to an alkynyl group, as defined herein, in which one or more of the constituent carbon atoms have been replaced by nitrogen, oxygen, or sulfur. In some embodiments, the heteroalkynyl group can be further substituted with 1, 2, 3, or 4 substituent groups as described herein for alkynyl groups. Examples of heteroalkynyl groups are an “alkynoxy” which, as used herein, refers alkynyl-O—. A heteroalkynylene is a divalent heteroalkynyl group.

[0143] The term “hydroxy,” as used herein, represents an —OH group.

[0144] The alkyl, heteroalkyl groups may be substituted or unsubstituted. When substituted, there will generally be 1 to 4 substituents present, unless otherwise specified. Substituents include, for example: alkyl (e.g., unsubstituted and substituted, where the substituents include any group described herein, e.g., aryl, halo, hydroxy), aryl (e.g., substituted and unsubstituted phenyl), carbocyclyl (e.g., substituted and unsubstituted cycloalkyl), halo (e.g., fluoro), hydroxyl, heteroalkyl (e.g., substituted and unsubstituted methoxy, ethoxy, or thioalkoxy), heteroaryl, heterocyclyl, amino (e.g., NH₂ or mono- or dialkyl amino), azido, cyano, nitro, or thiol. Aryl, carbocyclyl (e.g., cycloalkyl), heteroaryl, and heterocyclyl groups may also be substituted with alkyl (unsubstituted and substituted such as arylalkyl (e.g., substituted and unsubstituted benzyl)).

[0145] Compounds of the invention can have one or more asymmetric carbon atoms and can exist in the form of optically pure enantiomers, mixtures of enantiomers such as, for example, racemates, optically pure diastereoisomers, mixtures of diastereoisomers, diastereoisomeric racemates, or mixtures of diastereoisomeric racemates. The optically active forms can be obtained for example by resolution of the racemates, by asymmetric synthesis or asymmetric chromatography (chromatography with a chiral adsorbent or eluant). That is, certain of the disclosed compounds may exist in various stereoisomeric forms. Stereoisomers are compounds that differ only in their spatial arrangement. Enantiomers are pairs of stereoisomers whose mirror images are not superimposable, most commonly because they contain an asymmetrically substituted carbon atom that acts as a chiral center. “Enantiomer” means one of a pair of molecules that are mirror images of each other and are not superimposable. Diastereomers are stereoisomers that are not related as mirror images, most commonly because they contain two or more asymmetrically substituted carbon atoms and represent the configuration of substituents around one or more chiral carbon atoms. Enantiomers of a compound can be prepared, for example, by separating an enantiomer from a racemate using one or more well-known techniques and methods, such as, for example, chiral chromatography and separation methods based thereon. The appropriate technique and/or method for separating an enantiomer of a compound described herein from a racemic mixture can be readily determined by those of skill in the art. “Racemate” or “racemic mixture” means a compound containing two enantiomers, wherein such mixtures exhibit no optical activity; i.e., they do not rotate the plane of polarized light. “Geometric isomer” means isomers that differ in the orientation of substituent atoms in relationship to a carbon-carbon double bond, to a cycloalkyl ring, or to a bridged bicyclic system. Atoms (other than H) on each side of a carbon-carbon double bond may be in an E (substituents are on 25 opposite sides of the carbon-carbon double bond) or Z (substituents are oriented on the same side) configuration. “R,” “S,” “S*,” “R*,” “E,” “Z,” “cis,” and “trans,” indicate configurations relative to the core molecule. Certain of the disclosed compounds may exist in atropisomeric forms. Atropisomers are stereoisomers resulting from hindered rotation about single bonds where the steric strain barrier to rotation is high enough to allow for the isolation of the conformers. The compounds of the invention may be prepared as individual isomers by either isomer-specific synthesis or resolved from an isomeric mixture. Conventional resolution techniques include forming the salt of a free base of each isomer of an isomeric pair using an optically active acid (followed by fractional crystallization and regeneration of the free base), forming the salt of the acid form of each isomer of an isomeric pair using an optically active amine (followed by fractional crystallization and regeneration of the free acid), forming an ester or amide 35 of each of the isomers of an isomeric pair using an optically pure acid, amine or alcohol (followed by chromatographic separation and removal of the chiral auxiliary), or resolving an isomeric mixture of either a starting material or a final product using various well known chromatographic methods. When the stereochemistry of a disclosed compound is named or depicted by structure, the named or depicted stereoisomer is at least 60%, 70%, 80%, 90%, 99%, or 99.9% by weight relative to the other stereoisomers. When a single enantiomer is named or depicted by structure, the depicted or named enantiomer is at least 60%, 70%, 80%, 90%, 99%, or 99.9% by weight optically pure. When a single diastereomer is named or depicted by structure, the depicted or named diastereomer is at least 60%, 70%, 80%, 90%, 99%, or 99.9% by weight pure. Percent optical purity is the ratio of the weight of the enantiomer or over the weight of the enantiomer plus the weight of its optical isomer. Diastereomeric purity by weight is the ratio of the weight of one diastereomer or over the weight of all the diastereomers. When the stereochemistry of a disclosed compound is named or depicted by structure, the named or depicted stereoisomer is at least 60%, 70%, 80%, 90%, 99%, or 99.9% by mole fraction pure relative to the other stereoisomers. When a single enantiomer is named or depicted by structure, the depicted or named enantiomer is at least 60%, 70%, 80%, 90%, 99%, or 99.9% by mole fraction pure. When a single diastereomer is named or depicted by structure, the depicted or named diastereomer is at least 60%, 70%, 80%, 90%, 99%, or 99.9% by mole fraction pure. Percent purity by mole fraction is the ratio of the moles of the enantiomer or over the moles of the enantiomer plus the moles of its optical isomer. Similarly, percent purity by moles fraction is the ratio of the moles of the diastereomer or over the moles of the diastereomer plus the moles of its isomer. When a disclosed compound is named or depicted by structure without indicating the stereochemistry, and the compound has at least one chiral center, it is to be understood that the name or structure encompasses either enantiomer of the compound free from the corresponding optical isomer, a racemic mixture of the compound, or mixtures enriched in one enantiomer relative to its corresponding optical isomer. When a disclosed compound is named or depicted by structure without indicating the stereochemistry and has two or more chiral centers, it is to be understood that the name or structure encompasses a diastereomer free of other diastereomers, a number of diastereomers free from other diastereomeric pairs, mixtures of diastereomers, mixtures of diastereomeric pairs, mixtures of diastereomers in which one diastereomer is enriched relative to the other diastereomer(s), or mixtures of diastereomers in which one or more diastereomer is enriched relative to the other diastereomers. The invention embraces all of these forms.

[0146] Unless otherwise defined, all technical and scientific terms used herein have the same meaning as commonly understood by one of ordinary skill in the art to which this invention belongs. Methods and materials are described herein for use in the present disclosure; other, suitable methods and materials known in the art can also be used. The materials, methods, and examples are illustrative only and not intended to be limiting. All publications, patent applications, patents, sequences, database entries, and other references mentioned herein are incorporated by reference in their entirety. In case of conflict, the present specification, including definitions, will control

[0147] The details of one or more embodiments of the invention are set forth in the description below. Other features, objects, and advantages of the invention will be apparent from the description and from the claims.

### II. Methods of the Invention

[0148] The present invention provides methods of editing a MECP2 polynucleotide, e.g., a MECP2 polynucleotide comprising a single nucleotide polymorphism (SNP) associated with Rett syndrome, and methods for treating or preventing a MECP2-associated disease, e.g., Rett syndrome, in a subject. The methods include contacting the MECP2 polynucleotide with a guide oligonucleotide capable of effecting an adenosine deaminase acting on RNA (ADAR)-mediated adenosine to inosine alteration of the SNP associated with Rett syndrome.

[0149] The invention is used to make desired changes in a target sequence, e.g., a MECP2 polynucleotide comprising a SNP associated with Rett syndrome, in a cell or a subject by site-directed editing of nucleotides through the use of an oligonucleotide that is capable of effecting an adenosine deaminase acting on RNA (ADAR)-mediated adenosine to inosine alteration of the SNP. As a result, the target sequence is edited through an adenosine deamination reaction mediated by ADAR, converting adenosines into inosine.

[0150] The changes may be in 5′ or 3′ untranslated regions of a target RNA, in splice sites, in exons (changing amino acids in protein translated from the target RNA, changing codon usage or splicing behavior by changing exonic splicing silencers or enhancers, and/or introducing or removing start or stop codons), in introns (changing splicing by altering intronic splicing silencers or intronic splicing enhancers, branch points) and in general in any region affecting RNA stability, structure or functioning. The target RNA sequence may comprise a mutation that one may wish to correct or alter, such as a transition or a transversion.

[0151] RNA editing enzymes are known in the art. In some embodiments, the RNA editing enzyme is the adenosine deaminase acting on RNA (ADARs), such as hADARI and hADAR2 in humans or human cells.

[0152] Adenosine deaminases acting on RNA (ADARs) catalyze adenosine (A) to inosine (I) editing of RNA that possesses double-stranded (ds) structure. A-to-I RNA editing results in nucleotide substitution, because I is recognized as G instead of A both by ribosomes and by RNA polymerases. A-to-I substitution can also cause dsRNA destabilization, as I:U mismatch base pairs are less stable than A:U base pairs. A-to-I editing occurs with both viral and cellular RNAs, and affects a broad range of biological processes. These include virus growth and persistence, apoptosis and embryogenesis, neurotransmitter receptor and ion channel function, pancreatic cell function, and post-transcriptional gene regulation by microRNAs. Biochemical processes that provide a framework for understanding the physiologic changes following ADAR-catalyzed A-to-I (=G) editing events include mRNA translation by changing codons and hence the amino acid sequence of proteins; pre-mRNA splicing by altering splice site recognition sequences; RNA stability by changing sequences involved in nuclease recognition; genetic stability in the case of RNA virus genomes by changing sequences during viral RNA replication; and RNA-structure-dependent activities such as microRNA production or targeting or protein-RNA interactions.

[0153] Three human ADAR genes are known, of which two encode active deaminases (ADAR1 and ADAR2). Human ADAR3 (hADAR3) has been described in the prior art, but reportedly has no deaminase activity. Alternative promoters together with alternative splicing give rise to two protein size forms of ADAR1: an interferon-inducible ADAR1-p150 deaminase that binds dsRNA and Z-DNA, and a constitutively expressed ADAR1-p110 deaminase. ADAR2, like ADAR1-p110, is constitutively expressed and binds dsRNA. It is known that only the longer isoform of ADAR1 is capable of binding to the Z-DNA structure that can be comprised in the recruiting portion of the oligonucleotide construct according to the invention. Consequently, the level of the 150 kDa isoform present in the cell may be influenced by interferon, particularly interferon-gamma (IFN-gamma). hADARI is also inducible by TNF-alpha. This provides an opportunity to develop combination therapy, whereby interferon-gamma or TNF-alpha and oligonucleotide constructs comprising Z-DNA as recruiting portion according to the invention are administered to a patient either as a combination product, or as separate products, either simultaneously or subsequently, in any order. Certain disease conditions may already coincide with increased IFN-gamma or TNF-alpha levels in certain tissues of a patient, creating further opportunities to make editing more specific for diseased tissues.

[0154] Recruiting ADAR to specific sites of selected transcripts and deamination of adenosine regardless of neighboring bases holds great promise for the treatment of disease. In some embodiments, the oligonucleotide that is capable of effecting an adenosine deaminase acting on RNA (ADAR)-mediated adenosine to inosine alteration of the SNP, e.g., a guide oligonucleotide as described herein, further comprises an ADAR-recruiting domain. In some embodiments, the ADAR-recruiting domain comprises nucleotide sequences that may be covalently linked to the oligonucleotides for use in the methods of the instant invention and may form stem-loop structures that act as recruitment and binding regions for the ADAR enzyme. Oligonucleotides including such ADAR-recruiting domains may be referred to as “axiomer AONs” or “self-looping AONs.” The ADAR-recruiting domain portion may act to recruit an endogenous ADAR enzyme present in the cell. Such ADAR-recruiting domains do not require conjugated entities or presence of modified recombinant ADAR enzymes. Alternatively, the ADAR-recruiting portion may act to recruit a recombinant ADAR fusion protein that has been delivered to a cell or to a subject via an expression vector construct including a polynucleotide encoding an ADAR fusion protein. Such ADAR-fusion proteins may include the deaminase domain of ADAR1 or ADAR2 enzymes fused to another protein, e.g., to the MS2 bacteriophage coat protein. An ADAR-recruiting domain may be a nucleotide sequence based on a natural substrate (e.g., the GluR2 receptor pre-mRNA; such as a GluR2 ADAR-recruiting domain), a Z-DNA structure, or a domain known to recruit another protein which is part of an ADAR fusion protein, e.g., an MS2 ADAR-recruiting domain known to be recognized by the dsRNA binding regions of ADAR. A stem-loop structure of an ADAR-recruiting domain can be an intermolecular stem-loop structure, formed by two separate nucleic acid strands, or an intramolecular stem loop structure, formed within a single nucleic acid strand.

[0155] In some embodiments, the ADAR is endogenously expressed in a cell. The cell is selected from the group consisting of a bacterial cell, a eukaryotic cell, a mammalian cell, and a human cell. In principle the invention can be used with cells from any mammalian species, but it is preferably used with a human cell.

[0156] The oligonucleotide capable of effecting an adenosine deaminase acting on RNA (ADAR)-mediated adenosine to inosine alteration of the SNP, e.g., a guide oligonucleotide as described herein, comprises a nucleic acid sequence complementary to the MECP2 mRNA encoding the SNP associated with Rett syndrome. In some embodiments, the guide oligonucleotides are complementary to target mRNA with the exception of at least one mismatch. The oligonucleotide includes a mismatch opposite the target adenosine.

[0157] Once the oligonucleotide hybridizes to the target mRNA sequence, it forms a double-stranded RNA structure, which can be recognized by ADAR, and facilitates the recruitment of ADAR to the target sequence. As a result, ADAR can catalyze the deamination reaction of the specific adenosine in the SNP associated with Rett syndrome into an inosine.

[0158] As used herein, the phrase “SNP associated with Rett syndrome” refers to any SNPs that are associated with the onset or development of Rett syndrome. Exemplary SNPs associated with Rett syndrome may include, but are not limited to, any single nucleotide change in the MECP2 polynucleotide resulting in a pathogenic amino acid at positions 255, 168, 294 and/or 270 of the MECP2 protein. These mutations have been demonstrated to be pathogenic and are associated with the late-onset of Rett syndrome.

[0159] In some embodiments, the SNP associated with Rett syndrome is rs61749721, a SNP commonly referred to as the R255X variant (or mutation) based on the potential change from arginine (encoded by wild type allele) to a premature stop codon (encoded by the rs61749721 allele) at position 255 of the MECP2 protein. This SNP is also referred to as the R255X variant (or, mutation) based on the change from arginine to a premature stop codon at position 255 of the MECP2 protein. Upon successful editing by the methods of the invention, the allele is deaminated by ADAR, and this ADAR-mediated adenosine to inosine alteration substitutes the pathogenic amino acid, a premature stop codon, at position 255 of the MECP2 protein with a tryptophan, thereby removing the pathogenic or disease causing mutation in MECP2 protein.

[0160] In some embodiments, the SNP associated with Rett syndrome is rs61748421, a SNP commonly referred to as the R168X variant (or mutation) based on the potential change from arginine (encoded by rs61748421(C) allele) to a premature stop codon (encoded by the rs61748421(T) allele) at position 168 of the MECP2 protein. Upon successful editing by the methods of the invention, the rs61748421(A) allele is deaminated and converted to the rs61748421(G) allele by ADAR, and this ADAR-mediated adenosine to inosine alteration substitutes the pathogenic amino acid, a premature stop codon, at position 168 of the MECP2 protein with a tryptophan, thereby removing the pathogenic or disease causing mutation in MECP2 protein.

[0161] In some embodiments, the SNP associated with Rett syndrome is rs61751362, a SNP commonly referred to as the R294X variant (or mutation) based on the potential change from arginine (encoded by rs61751362(C) allele) to a premature stop codon (encoded by the rs61751362(T) allele) at position 294 of the MECP2 protein. Upon successful editing by the methods of the invention, the rs61751362(A) allele) is deaminated and converted to the rs61751362(G) allele by ADAR, and this ADAR-mediated adenosine to inosine alteration substitutes the pathogenic amino acid, a premature stop codon, at position 294 of the MECP2 protein with a tryptophan, thereby removing the pathogenic or disease causing mutation in MECP2 protein.

[0162] In some embodiments, the SNP associated with Rett syndrome is rs61750240, a SNP commonly referred to as the R270X variant (or mutation) based on the potential change from arginine (encoded by rs61750240(C) allele) to a premature stop codon (encoded by the rs61750240(T) allele) at position 270 of the MECP2 protein. Upon successful editing by the methods of the invention, the rs61748421(A) allele) is deaminated and converted to the rs61748421(G) allele by ADAR, and this ADAR-mediated adenosine to inosine alteration substitutes the pathogenic amino acid, a premature stop codon, at position 270 of the MECP2 protein with a tryptophan, thereby removing the pathogenic or disease causing mutation in MECP2 protein.

[0163] The methods of the present invention can be used with cells from any organ, e.g. skin, lung, heart, kidney, liver, pancreas, gut, muscle, gland, eye, brain, blood and the like. The invention is particularly suitable for modifying sequences in cells, tissues or organs implicated in a diseased state of a (human) subject. Such cells include but are not limited to brain cells or neurons, e.g., neurons near the base of the brain (i.e., midbrain or the substantia nigra), neurons from the brainstem, neurons in the striatum, neurons in the cortex, or neurons in the olfactory bulb.

[0164] The methods of the invention can also be used with mammalian cells which are not naturally present in an organism e.g. with a cell line or with an embryonic stem (ES) cell. The methods of the invention can be used with various types of stem cells, including pluripotent stem cells, totipotent stem cells, embryonic stem cells, induced pluripotent stem cells, etc.

[0165] The cells can be located in vitro or in vivo. One advantage of the invention is that it can be used with cells in situ in a living organism, but it can also be used with cells in culture. In some embodiments cells are treated ex vivo and are then introduced into a living organism (e.g. re-introduced into an organism from whom they were originally derived). In some embodiments, the cell is contacted in vivo. In other embodiments, the cell is ex vivo.

[0166] The methods of invention can also be used to edit target RNA sequences in cells within a so-called organoid. Organoids are self-organized three-dimensional tissue structures derived from stem cells. Such cultures can be crafted to replicate much of the complexity of an organ, or to express selected aspects of it like producing only certain types of cells (Lancaster & Knoblich, Science 2014, vol. 345 no. 6194 1247125). In a therapeutic setting they are useful because they can be derived in vitro from a patient's cells, and the organoids can then be re-introduced to the patient as autologous material which is less likely to be rejected than a normal transplant. Thus, according to another preferred embodiment, the invention may be practised on organoids grown from tissue samples taken from a patient (e.g. from their gastrointestinal tract; see Sala et al. J Surg Res. 2009; 156(2):205-12, and Sato et al. Gastroenterology 201 1; 141: 1762-72). Upon RNA editing in accordance with the invention, the organoids, or stem cells residing within the organoids, may be used to transplant back into the patient to ameliorate organ function.

[0167] In some embodiments, the cells to be treated have a genetic mutation. The mutation may be heterozygous or homozygous. The invention can be used to modify point mutations, for example, to correct a G to A mutation. In other embodiments, the cells to be treated do not have a genetic mutation. The invention can be used to create point mutations, for example, to generate a A to G mutation.

[0168] Accordingly, the invention is not limited to correcting mutations, as it may instead be useful to change a wild-type sequence into a mutated sequence by applying oligonucleotides according to the invention. One example where it may be advantageous to modify a wild-type adenosine is to bring about skipping of an exon, for example by modifying an adenosine that happens to be a branch site required for splicing of said exon. Another example is where the adenosine defines or is part of a recognition sequence for protein binding, or is involved in secondary structure defining the stability of the mRNA. In some embodiments, however, the invention is used in the opposite way by introducing a disease-associated mutation into a cell line or an animal, in order to provide a useful research tool for the disease in question. As an example of creating a disease model for research purposes, an oligonucleotide sequence described herein provides for the recruitment of editing activity in a human cell to create a mutation in MECP2, e.g., a R255X, R168X, R294X, and/or R270X mutation, that forms the basis for the onset of Rett syndrome. As a result, the invention can be used to provide research tools for diseases, to introduce new mutations which are less deleterious than an existing mutation.

[0169] A mutation to be reverted through RNA editing may have arisen on the level of the chromosome or some other form of DNA, such as mitochondrial DNA, or RNA, including pre-mRNA, ribosomal RNA or mitochondrial RNA. A change to be made may be in a target RNA of a pathogen, including fungi, yeasts, parasites, kinetoplastids, bacteria, phages, viruses etc, with which the cell or subject has been infected. Subsequently, the editing may take place on the RNA level on a target sequence inside such cell, subject or pathogen. Certain pathogens, such as viruses, release their nucleic acid, DNA or RNA into the cell of the infected host (cell). Other pathogens reside or circulate in the infected host. The oligonucleotide constructs of the invention may be used to edit target RNA sequences residing in a cell of the infected eukaryotic host, or to edit a RNA sequence inside the cell of a pathogen residing or circulating in the eukaryotic host, as long as the cells where the editing is to take place contain an editing entity compatible with the oligonucleotide construct administered thereto.

[0170] Without wishing to be bound be theory, the RNA editing through ADAR1 and ADAR2 is thought to take place on pre-mRNAs in the nucleus, during transcription or splicing. Editing of mitochondrial RNA codons or non-coding sequences in mature mRNAs is not excluded.

[0171] Deamination of an adenosine using the oligonucleotides disclosed herein includes any level of adenosine deamination, e.g., at least 1 deaminated adenosine within a target sequence (e.g., at least, 1, 2, 3, or more deaminated adenosines in a target sequence).

[0172] Adenosine deamination may be assessed by a decrease in an absolute or relative level of adenosines within a target sequence compared with a control level. The control level may be any type of control level that is utilized in the art, e.g., pre-dose baseline level, or a level determined from a similar subject, cell, or sample that is untreated or treated with a control (such as, e.g., buffer only control or inactive agent control).

[0173] Because the enzymatic activity of ADAR converts adenosines to inosines, adenosine deamination can alternatively be assessed by an increase in an absolute or relative level of inosines within a target sequence compared with a control level. Similarly, the control level may be any type of control level that is utilized in the art, e.g., pre-dose baseline level, or a level determined from a similar subject, cell, or sample that is untreated or treated with a control (such as, e.g., buffer only control or inactive agent control).

[0174] The levels of adenosines and/or inosines within a target sequence can be assessed using any of the methods known in the art for determining the nucleotide composition of a polynucleotide sequence. For example, the relative or absolute levels of adenosines or inosines within a target sequence can be assessed using nucleic acid sequencing technologies including but not limited to Sanger sequencing methods, Next Generation Sequencing (NGS; e.g., pyrosequencing, sequencing by reversible terminator chemistry, sequencing by ligation, and real-time sequencing) such as those offered on commercially available platforms (e.g., Illumina, Qiagen, Pacific Biosciences, Thermo Fisher, Roche, and Oxford Nanopore Technologies). Clonal amplification of target sequences for NGS may be performed using real-time polymerase chain reaction (also known as qPCR) on commercially available platforms from Applied Biosystems, Roche, Stratagene, Cepheid, Eppendorf, or Bio-Rad Laboratories. Additionally or alternatively, emulsion PCR methods can be used for amplification of target sequences using commercially available platforms such as Droplet Digital PCR by Bio-Rad Laboratories.

[0175] In certain embodiments, surrogate markers can be used to detect adenosine deamination within a target sequence. For example, effective treatment of a subject having a genetic disorder involving G-to-A mutations with an oligonucleotide of the present disclosure, as demonstrated by an acceptable diagnostic and monitoring criteria can be understood to demonstrate a clinically relevant adenosine deamination. In certain embodiments, the methods include a clinically relevant adenosine deamination, e.g., as demonstrated by a clinically relevant outcome after treatment of a subject with an oligonucleotide of the present disclosure.

[0176] Adenosine deamination in a gene of interest may be manifested by an increase or decrease in the levels of mRNA expressed by a first cell or group of cells (such cells may be present, for example, in a sample derived from a subject) in which a gene of interest is transcribed and which has or have been treated (e.g., by contacting the cell or cells with an oligonucleotide of the present disclosure, or by administering an oligonucleotide of the invention to a subject in which the cells are or were present) such that the expression of the gene of interest is increased or decreased, as compared to a second cell or group of cells substantially identical to the first cell or group of cells but which has not or have not been so treated (control cell(s) not treated with an oligonucleotide or not treated with an oligonucleotide targeted to the gene of interest). The degree of increase or decrease in the levels of mRNA of a gene of interest may be expressed in terms of:

$$\frac{( mRNA in control cells ) - ( mRNA in treated cells )}{( mRNA in control cells )} \times 100 \%$$

[0177] In other embodiments, change in the levels of a gene may be assessed in terms of a reduction of a parameter that is functionally linked to the expression of a gene of interest, e.g., protein expression of the gene of interest or signaling downstream of the protein. A change in the levels of the gene of interest may be determined in any cell expressing the gene of interest, either endogenous or heterologous from an expression construct, and by any assay known in the art.

[0178] A change in the level of expression of a gene of interest may be manifested by an increase or decrease in the level of the protein produced by the gene of interest that is expressed by a cell or group of cells (e.g., the level of protein expressed in a sample derived from a subject). As explained above, for the assessment of mRNA suppression, the change in the level of protein expression in a treated cell or group of cells may similarly be expressed as a percentage of the level of protein in a control cell or group of cells.

[0179] A control cell or group of cells that may be used to assess the change in the expression of a gene of interest includes a cell or group of cells that has not yet been contacted with an oligonucleotide of the present disclosure. For example, the control cell or group of cells may be derived from an individual subject (e.g., a human or animal subject) prior to treatment of the subject with an oligonucleotide.

[0180] The level of mRNA of a gene of interest that is expressed by a cell or group of cells may be determined using any method known in the art for assessing mRNA expression. In one embodiment, the level of expression of a gene of interest in a sample is determined by detecting a transcribed polynucleotide, or portion thereof, e.g., mRNA of the gene of interest. RNA may be extracted from cells using RNA extraction techniques including, for example, using acid phenol/guanidine isothiocyanate extraction (RNAzol B; Biogenesis), RNEASY™ RNA preparation kits (Qiagen) or PAXgene (PreAnalytix, Switzerland). Typical assay formats utilizing ribonucleic acid hybridization include nuclear run-on assays, RT-PCR, RNase protection assays, northern blotting, in situ hybridization, and microarray analysis. Circulating mRNA of the gene of interest may be detected using methods the described in PCT Publication WO2012/177906, the entire contents of which are hereby incorporated herein by reference. In some embodiments, the level of expression of the gene of interest is determined using a nucleic acid probe. The term “probe,” as used herein, refers to any molecule that is capable of selectively binding to a specific sequence, e.g. to an mRNA or polypeptide. Probes can be synthesized by one of skill in the art, or derived from appropriate biological preparations. Probes may be specifically designed to be labeled. Examples of molecules that can be utilized as probes include, but are not limited to, RNA, DNA, proteins, antibodies, and organic molecules.

[0181] Isolated mRNA can be used in hybridization or amplification assays that include, but are not limited to, Southern or northern analyses, polymerase chain reaction (PCR) analyses, and probe arrays. One method for the determination of mRNA levels involves contacting the isolated mRNA with a nucleic acid molecule (probe) that can hybridize to the mRNA of a gene of interest. In one embodiment, the mRNA is immobilized on a solid surface and contacted with a probe, for example by running the isolated mRNA on an agarose gel and transferring the mRNA from the gel to a membrane, such as nitrocellulose. In an alternative embodiment, the probe(s) are immobilized on a solid surface and the mRNA is contacted with the probe(s), for example, in an AFFYMETRIX gene chip array. A skilled artisan can readily adapt known mRNA detection methods for use in determining the level of mRNA of a gene of interest.

[0182] An alternative method for determining the level of expression of a gene of interest in a sample involves the process of nucleic acid amplification and/or reverse transcriptase (to prepare cDNA) of for example mRNA in the sample, e.g., by RT-PCR (the experimental embodiment set forth in Mullis, 1987, U.S. Pat. No. 4,683,202), ligase chain reaction (Barany (1991) Proc. Natl. Acad. Sci. USA 88:189-193), self-sustained sequence replication (Guatelli et al. (1990) Proc. Natl. Acad. Sci. USA 87:1874-1878), transcriptional amplification system (Kwoh et al. (1989) Proc. Natl. Acad. Sci. USA 86:1173-1177), Q-Beta Replicase (Lizardi et al. (1988) Bio/Technology 6:1197), rolling circle replication (Lizardi et al., U.S. Pat. No. 5,854,033) or any other nucleic acid amplification method, followed by the detection of the amplified molecules using techniques well known to those of skill in the art. These detection schemes are especially useful for the detection of nucleic acid molecules if such molecules are present in very low numbers. In particular aspects of the invention, the level of expression of a gene of interest is determined by quantitative fluorogenic RT-PCR (i.e., the TAQMAN™ System) or the DUAL-GLO® Luciferase assay.

[0183] The expression levels of mRNA of a gene of interest may be monitored using a membrane blot (such as used in hybridization analysis such as northern, Southern, dot, and the like), or microwells, sample tubes, gels, beads or fibers (or any solid support including bound nucleic acids). See U.S. Pat. Nos. 5,770,722; 5,874,219; 5,744,305; 5,677,195; and 5,445,934, which are incorporated herein by reference. The determination of gene expression level may also include using nucleic acid probes in solution.

[0184] In some embodiments, the level of mRNA expression is assessed using branched DNA (bDNA) assays or real time PCR (qPCR). The use of this PCR method is described and exemplified in the Examples presented herein. Such methods can also be used for the detection of nucleic acids of the gene of interest.

[0185] The level of protein produced by the expression of a gene of interest may be determined using any method known in the art for the measurement of protein levels. Such methods include, for example, electrophoresis, capillary electrophoresis, high performance liquid chromatography (HPLC), thin layer chromatography (TLC), hyperdiffusion chromatography, fluid or gel precipitin reactions, absorption spectroscopy, a colorimetric assays, spectrophotometric assays, flow cytometry, immunodiffusion (single or double), immunoelectrophoresis, western blotting, radioimmunoassay (RIA), enzyme-linked immunosorbent assays (ELISAs), immunofluorescent assays, electrochemiluminescence assays, and the like. Such assays can also be used for the detection of proteins indicative of the presence or replication of proteins produced by the gene of interest. Additionally, the above assays may be used to report a change in the mRNA sequence of interest that results in the recovery or change in protein function thereby providing a therapeutic effect and benefit to the subject, treating a disorder in a subject, and/or reducing of symptoms of a disorder in the subject.

### Methods of Treatment

[0186] The present invention also include methods of treating or preventing a MECP2-associated disease or disorder, e.g., Rett syndrome. For example, the methods of the invention may be used to treat or prevent any MECP2-associated disorders which may be caused by a guanosine to adenosine mutation, the introduction of a premature stop codon, or expression of an undesired protein. In some embodiments, the oligonucleotides for use in the methods of the invention, when introduced to a cell or a subject, can result in correction of a guanosine to adenosine mutation. In some embodiments, the oligonucleotides for use in the methods of the invention can result in turning off of a premature stop codon so that a desired protein is expressed. In some embodiments, the oligonucleotides for use in the methods of the invention can result in inhibition of expression of an undesired protein.

[0187] In one aspect, the present invention is directed to a method of treating Rett syndrome in a subject in need thereof. The method comprises identifying a subject with a single nucleotide polymorphism (SNP) associated with Rett syndrome in a MECP2 polynucleotide; and contacting the MECP2 polynucleotide in a cell of the subject with a guide oligonucleotide capable of effecting an adenosine deaminase acting on RNA (ADAR)-mediated adenosine to inosine alteration of the SNP associated with Rett syndrome, thereby treating the subject.

[0188] In another aspect, the present invention is directed to a method of treating Rett syndrome in a subject in need thereof. The method comprises identifying a subject with a single nucleotide polymorphism (SNP) associated with Rett syndrome in a MECP2 polynucleotide; contacting the MECP2 polynucleotide in a cell with a guide oligonucleotide capable of effecting an adenosine deaminase acting on RNA (ADAR)-mediated adenosine to inosine alteration of the SNP associated with Rett syndrome, and administering the cell to the subject, thereby treating the subject.

[0189] In some embodiments, the subject is a human subject.

[0190] The methods of the invention thus may include a step of identifying a subject with a single nucleotide polymorphism (SNP) associated with Rett syndrome in a MECP2 polynucleotide. Specifically, the methods of the invention include a step of identifying the presence of the desired nucleotide change or SNPs in the target RNA sequence, thereby verifying that the target RNA sequence has the disease causing mutations to be corrected or edited. This step will typically involve sequencing of the relevant part of the target RNA sequence, or a cDNA copy thereof (or a cDNA copy of a splicing product thereof, in case the target RNA is a pre-mRNA), and the sequence change can thus be easily verified. Alternatively the modifications may be assessed on the level of the protein (length, glycosylation, function or the like), or by some functional read-out.

[0191] The methods disclosed herein also include contacting the MECP2 polynucleotides with a single nucleotide polymorphism (SNP) associated with Rett syndrome in a cell or a subject (including a subject identified as being in need of such treatment, or a subject suspected of being at risk of disease and in need of such treatment) with a guide oligonucleotide capable of effecting an adenosine deaminase acting on RNA (ADAR)-mediated adenosine to inosine alteration of the SNP associated with Rett syndrome, as described herein.

[0192] The guide oligonucleotides for use in the methods of the invention are designed to specifically target the MECP2 gene of a subject (e.g., a human patient) in need thereof, and are capable of effecting an ADAR-mediated adenosine to inosine alteration in the SNPs associated with Rett syndrome in the MECP2 gene. In some embodiments, the guide oligonucleotides are capable of recruiting the ADAR to the target mRNA, which then catalyze deamination of target adenosines in the target mRNA. Such treatment will be suitably introduced to a subject, particularly a human subject, suffering from, having, susceptible to, or at risk for developing Rett syndrome. The compositions disclosed herein may be also used in the treatment of any other disorders in which Rett syndrome may be implicated.

[0193] In one embodiment, the invention provides a method of monitoring treatment progress. The method includes the step of determining a level of diagnostic marker (Marker) (e.g., SNP associated with Rett syndrome) or diagnostic measurement (e.g., screen, assay) in a subject suffering from or susceptible to developing Rett syndrome, or symptoms associated with Rett syndrome in which the subject has been administered a therapeutic amount of a composition disclosed herein sufficient to treat the disease or symptoms thereof. The level of Marker determined in the method can be compared to known levels of Marker in either healthy normal controls or in other afflicted patients to establish the subject's disease status. In preferred embodiments, a second level of Marker in the subject is determined at a time point later than the determination of the first level, and the two levels are compared to monitor the course of disease or the efficacy of the therapy. In certain preferred embodiments, a pre-treatment level of Marker in the subject is determined prior to beginning treatment according to this invention; this pre-treatment level of Marker can then be compared to the level of Marker in the subject after the treatment commences, to determine the efficacy of the treatment. Other methods of diagnostic measurement include, but are not limited to, observing one or more of the signs and symptoms of Rett syndrome disclosed herein, during the child's early growth and development, and conducting ongoing evaluations of the child's physical and neurological status. Examples of main diagnostic criteria or symptoms include partial or complete loss of acquired purposeful hand skills, partial or complete loss of acquired spoken language, repetitive hand movements (such has hand wringing or squeezing, clapping or rubbing), and gait abnormalities, including toe-walking or an unsteady, wide-based, stiff-legged walk. Supportive criteria are not required for a diagnosis of Rett syndrome but may occur in some individuals. In addition, these symptoms which vary in severity from child to child may not be observed in very young girls but may develop with age. A child with supportive criteria but none of the essential criteria does not have Rett syndrome. Supportive criteria include scoliosis, teeth-grinding, small cold hands and feet in relation to height, abnormal sleep patterns, abnormal muscle tone, inappropriate laughing or screaming, intense eye communication, and diminished response to pain. In addition to the main diagnostic criteria, a number of specific conditions help rule out a diagnosis of Rett syndrome. These are referred to as exclusion criteria. Children with any one of the following criteria do not have Rett syndrome: brain injury secondary to trauma, neurometabolic disease, severe infection that causes neurological problems; and grossly abnormal psychomotor development in the first 6 months of life.

[0194] In some embodiments, cells are obtained from the subject and contacted with an oligonucleotide composition of the invention as provided herein. In some embodiments, the cell is autologous, allogenic, or xenogenic to the subject. In some embodiments, cells removed from a subject and contacted ex vivo with an oligonucleotide composition of the invention are re-introduced into the subject, optionally after the desired genomic modification has been effected or detected in the cells.

[0195] In some embodiments, the oligonucleotide for use in the methods of the present disclosure is introduced to a subject such that the oligonucleotide is delivered to a specific site within the subject. The change in the expression of the gene of interest may be assessed using measurements of the level or change in the level of mRNA or protein produced by the gene of interest in a sample derived from a specific site within the subject.

[0196] In other embodiments, the oligonucleotide is introduced into the cell or the subject in an amount and for a time effective to result in one of (or more, e.g., two or more, three or more, four or more of: (a) decrease the number of adenosines within a target sequence of the gene of interest, (b) decrease the number of pathogenic mutations in the target protein, e.g., MECP2, (c) delayed onset of Rett syndrome, (d) increased survival of subject, (e) recovery or change in protein function, and (f) reduction in one or more of symptoms related to Rett syndrome, such as loss of the purposeful use of hands and the ability to speak, problems crawling or walking and diminished eye contact, compulsive hand movements such as wringing and washing, apraxia, autistic-like behaviors, walking on the toes, sleep problems, a wide-based gait, teeth grinding and difficulty chewing, slowed growth, seizures, cognitive disabilities, and breathing difficulties while awake such as hyperventilation, apnea (breath holding), and air swallowing.

[0197] Treating disorders associated with G-to-A mutations can also result in a decrease in the mortality rate of a population of treated subjects in comparison to an untreated population. For example, the mortality rate is decreased by more than 2% (e.g., more than 5%, 10%, or 25%). A decrease in the mortality rate of a population of treated subjects may be measured by any reproducible means, for example, by calculating for a population the average number of disease-related deaths per unit time following initiation of treatment with a compound or pharmaceutically acceptable salt of a compound described herein. A decrease in the mortality rate of a population may also be measured, for example, by calculating for a population the average number of disease-related deaths per unit time following completion of a first round of treatment with a compound or pharmaceutically acceptable salt of a compound described herein.

[0198] A. Methods of Administration

[0199] The delivery of an oligonucleotide for use in the methods of the invention to a cell e.g., a cell within a subject, such as a human subject (e.g., a subject in need thereof, such as a subject having a Rett syndrome) can be achieved in a number of different ways. For example, delivery may be performed by contacting a cell with an oligonucleotide of the invention either in vitro or in vivo. In vivo delivery may also be performed directly by administering a composition including an oligonucleotide to a subject. Alternatively, in vivo delivery may be performed indirectly by administering one or more vectors that encode and direct the expression of the oligonucleotide. Combinations of in vitro and in vivo methods of contacting a cell are also possible. Contacting a cell may be direct or indirect. Furthermore, contacting a cell may be accomplished via a targeting ligand, including any ligand described herein or known in the art. In some embodiments, the targeting ligand is a carbohydrate moiety, e.g., a GalNAc₃ ligand, or any other ligand that directs the oligonucleotide to a site of interest, for example, the central nervous system, such as, the midbrain, e.g., the substantia nigra; the striatum; the brainstem; the cortex; or the forebrain, e.g., the olfactory bulb.

[0200] Contacting of a cell with an oligonucleotide may be done in vitro or in vivo. Known methods can be adapted for use with an oligonucleotide of the invention (see e.g., Akhtar S. and Julian R L., (1992) Trends Cell. Biol. 2(5):139-144 and WO94/02595, which are incorporated herein by reference in their entireties). For in vivo delivery, factors to consider in order to deliver an oligonucleotide molecule include, for example, biological stability of the delivered molecule, prevention of non-specific effects, and accumulation of the delivered molecule in the target tissue. The non-specific effects of an oligonucleotide can be minimized by local administration, for example, by direct injection or implantation into a tissue or topically administering the preparation. Local administration to a treatment site maximizes local concentration of the agent, limits the exposure of the agent to systemic tissues that can otherwise be harmed by the agent or that can degrade the agent, and permits a lower total dose of the oligonucleotide molecule to be administered.

[0201] For administering an oligonucleotide systemically for the treatment of a disease, the oligonucleotide can include alternative nucleobases, alternative sugar moieties, and/or alternative internucleoside linkages, or alternatively delivered using a drug delivery system; both methods act to prevent the rapid degradation of the oligonucleotide by endo- and exo-nucleases in vivo. Modification of the oligonucleotide or the pharmaceutical carrier can also permit targeting of the oligonucleotide composition to the target tissue and avoid undesirable off-target effects. Oligonucleotide molecules can be modified by chemical conjugation to lipophilic groups such as cholesterol to enhance cellular uptake and prevent degradation. In an alternative embodiment, the oligonucleotide can be delivered using drug delivery systems such as a nanoparticle, a lipid nanoparticle, a polyplex nanoparticle, a lipoplex nanoparticle, a dendrimer, a polymer, liposomes, or a cationic delivery system. Positively charged cationic delivery systems facilitate binding of an oligonucleotide molecule (negatively charged) and also enhance interactions at the negatively charged cell membrane to permit efficient uptake of an oligonucleotide by the cell. Cationic lipids, dendrimers, or polymers can either be bound to an oligonucleotide, or induced to form a vesicle or micelle that encases an oligonucleotide. The formation of vesicles or micelles further prevents degradation of the oligonucleotide when administered systemically. In general, any methods of delivery of nucleic acids known in the art may be adaptable to the delivery of the oligonucleotides of the invention. Methods for making and administering cationic oligonucleotide complexes are well within the abilities of one skilled in the art (see e.g., Sorensen, D R., et al. (2003) J. Mol. Biol 327:761-766; Verma, U N. et al., (2003) Clin. Cancer Res. 9:1291-1300; Arnold, A S et al., (2007) J. Hypertens. 25:197-205, which are incorporated herein by reference in their entirety). Some non-limiting examples of drug delivery systems useful for systemic delivery of oligonucleotides include DOTAP (Sorensen, D R., et al (2003), supra; Verma, U N. et al., (2003), supra), Oligofectamine, “solid nucleic acid lipid particles” (Zimmermann, T S. et al., (2006) Nature 441:111-114), cardiolipin (Chien, P Y. et al., (2005) Cancer Gene Ther. 12:321-328; Pal, A. et al., (2005) Int J. Oncol. 26:1087-1091), polyethyleneimine (Bonnet M E. et al., (2008) Pharm. Res. August 16 Epub ahead of print; Aigner, A. (2006) J. Biomed. Biotechnol. 71659), Arg-Gly-Asp (RGD) peptides (Liu, S. (2006) Mol. Pharm. 3:472-487), and polyamidoamines (Tomalia, D A. et al., (2007) Biochem. Soc. Trans. 35:61-67; Yoo, H. et al., (1999) Pharm. Res. 16:1799-1804). In some embodiments, an oligonucleotide forms a complex with cyclodextrin for systemic administration. Methods for administration and pharmaceutical compositions of oligonucleotides and cyclodextrins can be found in U.S. Pat. No. 7,427,605, which is herein incorporated by reference in its entirety. In some embodiments the oligonucleotides of the invention are delivered by polyplex or lipoplex nanoparticles. Methods for administration and pharmaceutical compositions of oligonucleotides and polyplex nanoparticles and lipoplex nanoparticles can be found in U.S. Patent Application Nos. 2017/0121454; 2016/0369269; 2016/0279256; 2016/0251478; 2016/0230189; 2015/0335764; 2015/0307554; 2015/0174549; 2014/0342003; 2014/0135376; and 2013/0317086, which are herein incorporated by reference in their entirety.

[0202] i. Membranous Molecular Assembly Delivery Methods

[0203] Oligonucleotides for use in the methods of the invention can also be delivered using a variety of membranous molecular assembly delivery methods including polymeric, biodegradable microparticle, or microcapsule delivery devices known in the art. For example, a colloidal dispersion system may be used for targeted delivery an oligonucleotide agent described herein. Colloidal dispersion systems include macromolecule complexes, nanocapsules, microspheres, beads, and lipid-based systems including oil-in-water emulsions, micelles, mixed micelles, and liposomes. Liposomes are artificial membrane vesicles that are useful as delivery vehicles in vitro and in vivo. It has been shown that large unilamellar vesicles (LUV), which range in size from 0.2-4.0 μm can encapsulate a substantial percentage of an aqueous buffer containing large macromolecules. Liposomes are useful for the transfer and delivery of active ingredients to the site of action. Because the liposomal membrane is structurally similar to biological membranes, when liposomes are applied to a tissue, the liposomal bilayer fuses with bilayer of the cellular membranes. As the merging of the liposome and cell progresses, the internal aqueous contents that include the oligonucleotide are delivered into the cell where the oligonucleotide can specifically bind to a target RNA and can mediate ADAR-mediated RNA editing. In some cases, the liposomes are also specifically targeted, e.g., to direct the oligonucleotide to particular cell types. The composition of the liposome is usually a combination of phospholipids, usually in combination with steroids, especially cholesterol. Other phospholipids or other lipids may also be used. The physical characteristics of liposomes depend on pH, ionic strength, and the presence of divalent cations.

[0204] A liposome containing an oligonucleotide can be prepared by a variety of methods. In one example, the lipid component of a liposome is dissolved in a detergent so that micelles are formed with the lipid component. For example, the lipid component can be an amphipathic cationic lipid or lipid conjugate. The detergent can have a high critical micelle concentration and may be nonionic. Exemplary detergents include cholate, CHAPS, octylglucoside, deoxycholate, and lauroyl sarcosine. The oligonucleotide preparation is then added to the micelles that include the lipid component. The cationic groups on the lipid interact with the oligonucleotide and condense around the oligonucleotide to form a liposome. After condensation, the detergent is removed, e.g., by dialysis, to yield a liposomal preparation of oligonucleotide.

[0205] If necessary, a carrier compound that assists in condensation can be added during the condensation reaction, e.g., by controlled addition. For example, the carrier compound can be a polymer other than a nucleic acid (e.g., spermine or spermidine). The pH can also be adjusted to favor condensation.

[0206] Methods for producing stable polynucleotide delivery vehicles, which incorporate a polynucleotide/cationic lipid complex as a structural component of the delivery vehicle, are further described in, e.g., WO 96/37194, the entire contents of which are incorporated herein by reference. Liposome formation can also include one or more aspects of exemplary methods described in Feigner, P. L. et al., (1987) Proc. Natl. Acad. Sci. USA 8:7413-7417; U.S. Pat. Nos. 4,897,355; 5,171,678; Bangham et al., (1965) M. Mol. Biol. 23:238; Olson et al., (1979) Biochim. Biophys. Acta 557:9; Szoka et al., (1978) Proc. Natl. Acad. Sci. 75: 4194; Mayhew et al., (1984) Biochim. Biophys. Acta 775:169; Kim et al., (1983) Biochim. Biophys. Acta 728:339; and Fukunaga et al., (1984) Endocrinol. 115:757. Commonly used techniques for preparing lipid aggregates of appropriate size for use as delivery vehicles include sonication and freeze-thaw plus extrusion (see, e.g., Mayer et al., (1986) Biochim. Biophys. Acta 858:161. Microfluidization can be used when consistently small (50 to 200 nm) and relatively uniform aggregates are desired (Mayhew et al., (1984) Biochim. Biophys. Acta 775:169. These methods are readily adapted to packaging oligonucleotide preparations into liposomes.

[0207] Liposomes fall into two broad classes. Cationic liposomes are positively charged liposomes which interact with the negatively charged nucleic acid molecules to form a stable complex. The positively charged nucleic acid/liposome complex binds to the negatively charged cell surface and is internalized in an endosome. Due to the acidic pH within the endosome, the liposomes are ruptured, releasing their contents into the cell cytoplasm (Wang et al. (1987) Biochem. Biophys. Res. Commun., 147:980-985).

[0208] Liposomes, which are pH-sensitive or negatively charged, entrap nucleic acids rather than complex with them. Since both the nucleic acid and the lipid are similarly charged, repulsion rather than complex formation occurs. Nevertheless, some nucleic acid is entrapped within the aqueous interior of these liposomes. pH sensitive liposomes have been used to deliver nucleic acids encoding the thymidine kinase gene to cell monolayers in culture. Expression of the exogenous gene was detected in the target cells (Zhou et al. (1992) Journal of Controlled Release, 19:269-274).

[0209] One major type of liposomal composition includes phospholipids other than naturally-derived phosphatidylcholine. Neutral liposome compositions, for example, can be formed from dimyristoyl phosphatidylcholine (DMPC) or dipalmitoyl phosphatidylcholine (DPPC). Anionic liposome compositions generally are formed from dimyristoyl phosphatidylglycerol, while anionic fusogenic liposomes are formed primarily from dioleoyl phosphatidylethanolamine (DOPE). Another type of liposomal composition is formed from phosphatidylcholine (PC) such as, for example, soybean PC, and egg PC. Another type is formed from mixtures of phospholipid and/or phosphatidylcholine and/or cholesterol.

[0210] Examples of other methods to introduce liposomes into cells in vitro and in vivo include U.S. Pat. Nos. 5,283,185; 5,171,678; WO 94/00569; WO 93/24640; WO 91/16024; Feigner, (1994) J. Biol. Chem. 269:2550; Nabel, (1993) Proc. Natl. Acad. Sci. 90:11307; Nabel, (1992) Human Gene Ther. 3:649; Gershon, (1993) Biochem. 32:7143; and Strauss, (1992) EMBO J. 11:417.

[0211] Non-ionic liposomal systems have also been examined to determine their utility in the delivery of drugs to the skin, in particular systems including non-ionic surfactant and cholesterol. Non-ionic liposomal formulations including NOVASOME™ I (glyceryl dilaurate/cholesterol/polyoxyethylene-10-stearyl ether) and NOVASOME™ II (glyceryl distearate/cholesterol/polyoxyethylene-10-stearyl ether) were used to deliver cyclosporin-A into the dermis of mouse skin. Results indicated that such non-ionic liposomal systems were effective in facilitating the deposition of cyclosporine A into different layers of the skin (Hu et al., (1994) S.T.P. Pharma. Sci., 4(6):466).

[0212] Liposomes may also be sterically stabilized liposomes, including one or more specialized lipids that result in enhanced circulation lifetimes relative to liposomes lacking such specialized lipids. Examples of sterically stabilized liposomes are those in which part of the vesicle-forming lipid portion of the liposome (A) includes one or more glycolipids, such as monosialoganglioside G_{M1}, or (B) is derivatized with one or more hydrophilic polymers, such as a polyethylene glycol (PEG) moiety. While not wishing to be bound by any particular theory, it is thought in the art that, at least for sterically stabilized liposomes containing gangliosides, sphingomyelin, or PEG-derivatized lipids, the enhanced circulation half-life of these sterically stabilized liposomes derives from a reduced uptake into cells of the reticuloendothelial system (RES) (Allen et al., (1987) FEBS Letters, 223:42; Wu et al., (1993) Cancer Research, 53:3765).

[0213] Various liposomes including one or more glycolipids are known in the art. Papahadjopoulos et al. (Ann. N.Y. Acad. Sci., (1987), 507:64) reported the ability of monosialoganglio side G^{M1}, galactocerebroside sulfate, and phosphatidylinositol to improve blood half-lives of liposomes. These findings were expounded upon by Gabizon et al. (Proc. Natl. Acad. Sci. U.S.A., (1988), 85:6949). U.S. Pat. No. 4,837,028 and WO 88/04924, both to Allen et al., disclose liposomes including (1) sphingomyelin and (2) the ganglioside G_{M1} or a galactocerebroside sulfate ester. U.S. Pat. No. 5,543,152 (Webb et al.) discloses liposomes including sphingomyelin. Liposomes including 1,2-sn-dimyristoylphosphatidylcholine are disclosed in WO 97/13499 (Lim et al).

[0214] In one embodiment, cationic liposomes are used. Cationic liposomes possess the advantage of being able to fuse to the cell membrane. Non-cationic liposomes, although not able to fuse as efficiently with the plasma membrane, are taken up by macrophages in vivo and can be used to deliver oligonucleotides to macrophages.

[0215] Further advantages of liposomes include: liposomes obtained from natural phospholipids are biocompatible and biodegradable; liposomes can incorporate a wide range of water and lipid soluble drugs; liposomes can protect encapsulated oligonucleotides in their internal compartments from metabolism and degradation (Rosoff, in “Pharmaceutical Dosage Forms,” Lieberman, Rieger and Banker (Eds.), 1988, volume 1, p. 245). Important considerations in the preparation of liposome formulations are the lipid surface charge, vesicle size and the aqueous volume of the liposomes.

[0216] A positively charged synthetic cationic lipid, N-[1-(2,3-dioleyloxy)propyl]-N,N,N-trimethylammonium chloride (DOTMA) can be used to form small liposomes that interact spontaneously with nucleic acid to form lipid-nucleic acid complexes which are capable of fusing with the negatively charged lipids of the cell membranes of tissue culture cells, resulting in delivery of oligonucleotides (see, e.g., Feigner, P. L. et al., (1987) Proc. Natl. Acad. Sci. USA 8:7413-7417, and U.S. Pat. No. 4,897,355 for a description of DOTMA and its use with DNA).

[0217] A DOTMA analogue, 1,2-bis(oleoyloxy)-3-(trimethylammonia)propane (DOTAP) can be used in combination with a phospholipid to form DNA-complexing vesicles. LIPOFECTIN™ Bethesda Research Laboratories, Gaithersburg, Md.) is an effective agent for the delivery of highly anionic nucleic acids into living tissue culture cells that include positively charged DOTMA liposomes which interact spontaneously with negatively charged polynucleotides to form complexes. When enough positively charged liposomes are used, the net charge on the resulting complexes is also positive. Positively charged complexes prepared in this way spontaneously attach to negatively charged cell surfaces, fuse with the plasma membrane, and efficiently deliver functional nucleic acids into, for example, tissue culture cells. Another commercially available cationic lipid, 1,2-bis(oleoyloxy)-3,3-(trimethylammonia)propane (“DOTAP”) (Boehringer Mannheim, Indianapolis, id.) differs from DOTMA in that the oleoyl moieties are linked by ester, rather than ether linkages.

[0218] Other reported cationic lipid compounds include those that have been conjugated to a variety of moieties including, for example, carboxyspermine which has been conjugated to one of two types of lipids and includes compounds such as 5-carboxyspermylglycine dioctaoleoylamide (“DOGS”) (TRANSFECTAM™, Promega, Madison, Wis.) and dipalmitoylphosphatidylethanolamine 5-carboxyspermyl-amide (“DPPES”) (see, e.g., U.S. Pat. No. 5,171,678).

[0219] Another cationic lipid conjugate includes derivatization of the lipid with cholesterol (“DC-Chol”) which has been formulated into liposomes in combination with DOPE (See, Gao, X. and Huang, L., (1991) Biochim. Biophys. Res. Commun. 179:280). Lipopolylysine, made by conjugating polylysine to DOPE, has been reported to be effective for transfection in the presence of serum (Zhou, X. et al., (1991) Biochim. Biophys. Acta 1065:8). For certain cell lines, these liposomes containing conjugated cationic lipids, are said to exhibit lower toxicity and provide more efficient transfection than the DOTMA-containing compositions. Other commercially available cationic lipid products include DMRIE and DMRIE-HP (Vical, La Jolla, Calif.) and Lipofectamine (DOSPA) (Life Technology, Inc., Gaithersburg, Md.). Other cationic lipids suitable for the delivery of oligonucleotides are described in WO 98/39359 and WO 96/37194.

[0220] Liposomal formulations are particularly suited for topical administration, liposomes present several advantages over other formulations. Such advantages include reduced side effects related to high systemic absorption of the administered drug, increased accumulation of the administered drug at the desired target, and the ability to administer oligonucleotides into the skin. In some implementations, liposomes are used for delivering oligonucleotides to epidermal cells and also to enhance the penetration of oligonucleotides into dermal tissues, e.g., into skin. For example, the liposomes can be applied topically. Topical delivery of drugs formulated as liposomes to the skin has been documented (see, e.g., Weiner et al., (1992) Journal of Drug Targeting, vol. 2, 405-410 and du Plessis et al., (1992) Antiviral Research, 18:259-265; Mannino, R. J. and Fould-Fogerite, S., (1998) Biotechniques 6:682-690; Itani, T. et al., (1987) Gene 56:267-276; Nicolau, C. et al. (1987) Meth. Enzymol. 149:157-176; Straubinger, R. M. and Papahadjopoulos, D. (1983) Meth. Enzymol. 101:512-527; Wang, C. Y. and Huang, L., (1987) Proc. Natl. Acad. Sci. USA 84:7851-7855).

[0221] Non-ionic liposomal systems have also been examined to determine their utility in the delivery of drugs to the skin, in particular systems including non-ionic surfactant and cholesterol. Non-ionic liposomal formulations including Novasome I (glyceryl dilaurate/cholesterol/polyoxyethylene-10-stearyl ether) and Novasome II (glyceryl distearate/cholesterol/polyoxyethylene-10-stearyl ether) were used to deliver a drug into the dermis of mouse skin. Such formulations with oligonucleotide are useful for treating a dermatological disorder.

[0222] The targeting of liposomes is also possible based on, for example, organ-specificity, cell-specificity, and organelle-specificity and is known in the art. In the case of a liposomal targeted delivery system, lipid groups can be incorporated into the lipid bilayer of the liposome in order to maintain the targeting ligand in stable association with the liposomal bilayer. Various linking groups can be used for joining the lipid chains to the targeting ligand. Additional methods are known in the art and are described, for example in U.S. Patent Application Publication No. 20060058255, the linking groups of which are herein incorporated by reference.

[0223] Liposomes that include oligonucleotides can be made highly deformable. Such deformability can enable the liposomes to penetrate through pore that are smaller than the average radius of the liposome. For example, transfersomes are yet another type of liposomes, and are highly deformable lipid aggregates which are attractive candidates for drug delivery vehicles. Transfersomes can be described as lipid droplets which are so highly deformable that they are easily able to penetrate through pores which are smaller than the droplet. Transfersomes can be made by adding surface edge activators, usually surfactants, to a standard liposomal composition. Transfersomes that include oligonucleotides can be delivered, for example, subcutaneously by infection in order to deliver oligonucleotides to keratinocytes in the skin. In order to cross intact mammalian skin, lipid vesicles must pass through a series of fine pores, each with a diameter less than 50 nm, under the influence of a suitable transdermal gradient. In addition, due to the lipid properties, these transfersomes can be self-optimizing (adaptive to the shape of pores, e.g., in the skin), self-repairing, and can frequently reach their targets without fragmenting, and often self-loading. Transfersomes have been used to deliver serum albumin to the skin. The transfersome-mediated delivery of serum albumin has been shown to be as effective as subcutaneous injection of a solution containing serum albumin.

[0224] Other formulations amenable to the present invention are described in U.S. provisional application Ser. No. 61/018,616, filed Jan. 2, 2008; 61/018,611, filed Jan. 2, 2008; 61/039,748, filed Mar. 26, 2008; 61/047,087, filed Apr. 22, 2008 and 61/051,528, filed May 8, 2008. PCT application No. PCT/US2007/080331, filed Oct. 3, 2007 also describes formulations that are amenable to the present invention.

[0225] Surfactants find wide application in formulations such as emulsions (including microemulsions) and liposomes. The most common way of classifying and ranking the properties of the many different types of surfactants, both natural and synthetic, is by the use of the hydrophile/lipophile balance (HLB). The nature of the hydrophilic group (also known as the “head”) provides the most useful means for categorizing the different surfactants used in formulations (Rieger, in Pharmaceutical Dosage Forms, Marcel Dekker, Inc., New York, N.Y., 1988, p. 285).

[0226] If the surfactant molecule is not ionized, it is classified as a nonionic surfactant. Nonionic surfactants find wide application in pharmaceutical and cosmetic products and are usable over a wide range of pH values. In general, their HLB values range from 2 to about 18 depending on their structure. Nonionic surfactants include nonionic esters such as ethylene glycol esters, propylene glycol esters, glyceryl esters, polyglyceryl esters, sorbitan esters, sucrose esters, and ethoxylated esters. Nonionic alkanolamides and ethers such as fatty alcohol ethoxylates, propoxylated alcohols, and ethoxylated/propoxylated block polymers are also included in this class. The polyoxyethylene surfactants are the most popular members of the nonionic surfactant class.

[0227] If the surfactant molecule carries a negative charge when it is dissolved or dispersed in water, the surfactant is classified as anionic. Anionic surfactants include carboxylates such as soaps, acyl lactylates, acyl amides of amino acids, esters of sulfuric acid such as alkyl sulfates and ethoxylated alkyl sulfates, sulfonates such as alkyl benzene sulfonates, acyl isethionates, acyl taurates and sulfosuccinates, and phosphates. The most important members of the anionic surfactant class are the alkyl sulfates and the soaps.

[0228] If the surfactant molecule carries a positive charge when it is dissolved or dispersed in water, the surfactant is classified as cationic. Cationic surfactants include quaternary ammonium salts and ethoxylated amines. The quaternary ammonium salts are the most used members of this class.

[0229] If the surfactant molecule has the ability to carry either a positive or negative charge, the surfactant is classified as amphoteric. Amphoteric surfactants include acrylic acid derivatives, substituted alkylamides, N-alkylbetaines, and phosphatides.

[0230] The use of surfactants in drug products, formulations and in emulsions has been reviewed (Rieger, in Pharmaceutical Dosage Forms, Marcel Dekker, Inc., New York, N.Y., 1988, p. 285).

[0231] The oligonucleotide for use in the methods of the invention can also be provided as micellar formulations. Micelles are a particular type of molecular assembly in which amphipathic molecules are arranged in a spherical structure such that all the hydrophobic portions of the molecules are directed inward, leaving the hydrophilic portions in contact with the surrounding aqueous phase. The converse arrangement exists if the environment is hydrophobic.

[0232] ii. Lipid Nanoparticle-Based Delivery Methods

[0233] Oligonucleotides for use in the methods of in the invention may be fully encapsulated in a lipid formulation, e.g., a lipid nanoparticle (LNP), or other nucleic acid-lipid particles. LNPs are extremely useful for systemic applications, as they exhibit extended circulation lifetimes following intravenous (i.v.) injection and accumulate at distal sites (e.g., sites physically separated from the administration site). LNPs include “pSPLP,” which include an encapsulated condensing agent-nucleic acid complex as set forth in PCT Publication No. WO 00/03683. The particles of the present invention typically have a mean diameter of about 50 nm to about 150 nm, more typically about 60 nm to about 130 nm, more typically about 70 nm to about 110 nm, most typically about 70 nm to about 90 nm, and are substantially nontoxic. In addition, the nucleic acids when present in the nucleic acid-lipid particles of the present invention are resistant in aqueous solution to degradation with a nuclease. Nucleic acid-lipid particles and their method of preparation are disclosed in, e.g., U.S. Pat. Nos. 5,976,567; 5,981,501; 6,534,484; 6,586,410; 6,815,432; U.S. Publication No. 2010/0324120 and PCT Publication No. WO 96/40964.

[0234] In one embodiment, the lipid to drug ratio (mass/mass ratio) (e.g., lipid to oligonucleotide ratio) will be in the range of from about 1:1 to about 50:1, from about 1:1 to about 25:1, from about 3:1 to about 15:1, from about 4:1 to about 10:1, from about 5:1 to about 9:1, or about 6:1 to about 9:1. Ranges intermediate to the above recited ranges are also contemplated to be part of the invention.

[0235] Non-limiting examples of cationic lipid include N,N-dioleyl-N,N-dimethylammonium chloride (DODAC), N,N-distearyl-N,N-dimethylammonium bromide (DDAB), N-(I-(2,3-dioleoyloxy)propyl)-N,N,N-trimethylammonium chloride (DOTAP), N-(I-(2,3-dioleyloxy)propyl)-N,N,N-trimethylammonium chloride (DOTMA), N,N-dimethyl-2,3-dioleyloxy)propylamine (DODMA), 1,2-DiLinoleyloxy-N,N-dimethylaminopropane (DLinDMA), 1,2-Dilinolenyloxy-N,N-dimethylaminopropane (DLenDMA), 1,2-Dilinoleylcarbamoyloxy-3-dimethylaminopropane (DLin-C-DAP), 1,2-Dilinoleyoxy-3-(dimethylamino)acetoxypropane (DLin-DAC), 1,2-Dilinoleyoxy-3-morpholinopropane (DLin-MA), 1,2-Dilinoleoyl-3-dimethylaminopropane (DLinDAP), 1,2-Dilinoleylthio-3-dimethylaminopropane (DLin-S-DMA), 1-Linoleoyl-2-linoleyloxy-3-dimethylaminopropane (DLin-2-DMAP), 1,2-Dilinoleyloxy-3-trimethylaminopropane chloride salt (DLin-TMA.Cl), 1,2-Dilinoleoyl-3-trimethylaminopropane chloride salt (DLin-TAP.Cl), 1,2-Dilinoleyloxy-3-(N-methylpiperazino)propane (DLin-MPZ), or 3-(N,N-Dilinoleylamino)-1,2-propanediol (DLinAP), 3-(N,N-Dioleylamino)-1,2-propanedio (DOAP), 1,2-Dilinoleyloxo-3-(2-N,N-dimethylamino)ethoxypropane (DLin-EG-DMA), 1,2-Dilinolenyloxy-N,N-dimethylaminopropane (DLinDMA), 2,2-Dilinoleyl-4-dimethylaminomethyl-[1,3]-dioxolane (DLin-K-DMA) or analogs thereof, (3aR,5s,6aS)-N,N-dimethyl-2,2-di((9Z,12Z)-octadeca-9,12-dienyetetrahydro-3aH-cyclopenta[d][1,3]dioxol-5-amine (ALN100), (6Z,9Z,28Z,31Z)-heptatriaconta-6,9,28,31-tetraen-19-yl4-(dimethylamino)bu-tanoate (MC3), 1,1′-(2-(4-(2-((2-(bis(2-hydroxydodecyl)amino)ethyl)(2-hydroxydodecyl)ami-no)ethyl)piperazin-1-yeethylazanediyedidodecan-2-ol (Tech G1), or a mixture thereof. The cationic lipid can include, for example, from about 20 mol % to about 50 mol % or about 40 mol % of the total lipid present in the particle.

[0236] The ionizable/non-cationic lipid can be an anionic lipid or a neutral lipid including, but not limited to, distearoylphosphatidylcholine (DSPC), dioleoylphosphatidylcholine (DOPC), dipalmitoylphosphatidylcholine (DPPC), dioleoylphosphatidylglycerol (DOPG), dipalmitoylphosphatidylglycerol (DPPG), dioleoyl-phosphatidylethanolamine (DOPE), palmitoyloleoylphosphatidylcholine (POPC), palmitoyloleoylphosphatidylethanolamine (POPE), dioleoyl-phosphatidylethanolamine 4-(N-maleimidomethyl)-cyclohexane-1-carboxylate (DOPE-mal), dipalmitoyl phosphatidyl ethanolamine (DPPE), dimyristoylphosphoethanolamine (DMPE), distearoyl-phosphatidyl-ethanolamine (DSPE), 16-O-monomethyl PE, 16-O-dimethyl PE, 18-1-trans PE, 1-stearoyl-2-oleoyl-phosphatidyethanolamine (SOPE), cholesterol, or a mixture thereof. The non-cationic lipid can be, for example, from about 5 mol % to about 90 mol %, about 10 mol %, or about 58 mol % if cholesterol is included, of the total lipid present in the particle.

[0237] The conjugated lipid that inhibits aggregation of particles can be, for example, a polyethyleneglycol (PEG)-lipid including, without limitation, a PEG-diacylglycerol (DAG), a PEG-dialkyloxypropyl (DAA), a PEG-phospholipid, a PEG-ceramide (Cer), or a mixture thereof. The PEG-DAA conjugate can be, for example, a PEG-dilauryloxypropyl (Ci₂), a PEG-dimyristyloxypropyl (Ci₄), a PEG-dipalmityloxypropyl (Ci₆), or a PEG-distearyloxypropyl (C]₈). The conjugated lipid that prevents aggregation of particles can be, for example, from 0 mol % to about 20 mol % or about 2 mol % of the total lipid present in the particle.

[0238] In some embodiments, the nucleic acid-lipid particle further includes cholesterol at, e.g., about 10 mol % to about 60 mol % or about 50 mol % of the total lipid present in the particle.

[0239] B. Combination Therapies

[0240] A method of the invention can be used alone or in combination with an additional therapeutic agent, e.g., other agents that treat the same disorder, e.g., Rett syndrome, or symptoms associated therewith, or in combination with other types of therapies to the disorder. In combination treatments, the dosages of one or more of the therapeutic compounds may be reduced from standard dosages when administered alone. For example, doses may be determined empirically from drug combinations and permutations or may be deduced by isobolographic analysis. Dosages of the compounds when combined should provide a therapeutic effect.

[0241] In some embodiments, the second therapeutic agent is medication to address abnormal heart rhythm, or medication to control seizures, e.g., triheptanoin, a mitochondria activity boosting drug, ketamine, an NMDA receptor antagonist, sarizotan, a serotonin/dopamine receptor agonist, or cannabidiol.

[0242] The second agent may also be a therapeutic agent which is a non-drug treatment. For example, the second agent may be physical therapy, or speech therapy.]

[0243] In any of the combination embodiments described herein, the first and second therapeutic agents are administered simultaneously or sequentially, in either order. The first therapeutic agent may be administered immediately, up to 1 hour, up to 2 hours, up to 3 hours, up to 4 hours, up to 5 hours, up to 6 hours, up to 7 hours, up to, 8 hours, up to 9 hours, up to 10 hours, up to 11 hours, up to 12 hours, up to 13 hours, 14 hours, up to hours 16, up to 17 hours, up 18 hours, up to 19 hours up to 20 hours, up to 21 hours, up to 22 hours, up to 23 hours up to 24 hours or up to 1-7, 1-14, 1-21 or 1-30 days before or after the second therapeutic agent.

### III. Compositions for Use in the Methods of the Invention

[0244] The compositions for use in the methods of the present invention, i.e., methods of editing a MECP2 polynucleotide, e.g., a MECP2 polynucleotide comprising a single nucleotide polymorphism (SNP) associated with Rett syndrome, and methods for treating or preventing a MECP2-associated disease, e.g., Rett syndrome, in a subject, include a guide oligonucleotide capable of effecting an adenosine deaminase acting on RNA (ADAR)-mediated adenosine to inosine alteration of the SNP associated with Rett syndrome.

[0245] The oligonucleotides, or guide oligonucleotides, for use in the methods of the invention may be utilized to deaminate target adenosines on a specific mRNA, e.g., an adenosine which may be deaminated to produce a therapeutic result, e.g., in a subject in need thereof.

[0246] Examples of modifications resulting from deamination of target adenosines within a target codon are provided in Tables 1 and 2 below.

TABLE 1

| Target | Amino Acid Encoded | Modified | Amino Acid Encoded |
|---|---|---|---|
| Codon | by Target Codon | Codon | by Modified Codon |
| AAA | Lys | IAA | Glu |
| | | AIA | Arg |
| | | IIA | Gly |
| | | AII | Arg |
| | | IAI | Glu |
| | | III | Gly |
| AAC | Asn | IAC | Asp |
| | | AIC | Ser |
| | | IIC | Gly |
| AAG | Lys | IAG | Glu |
| | | AIG | Arg |
| | | IIG | Gly |
| AAU | Arg | IAU | Asp |
| | | AIU | Ser |
| | | IIU | Gly |
| ACA | Thr | ICA | Ala |
| | | ICI | Ala |
| ACC | Thr | ICC | Ala |
| ACG | Thr | ICG | Ala |
| ACU | Thr | ICU | Ala |
| AGA | Arg | IGA | Gly |
| | | IGI | Gly |
| AGC | Ser | IGC | Gly |
| AGG | Arg | IGG | Gly |
| AGU | Ser | IGU | Gly |
| AUA | Ile | IUA | Asp |
| | | AUI | Met |
| | | IUI | Val |
| AUC | Ile | IUC | Val |
| AUG | Met | IUG | Val |
| AUU | Ile | IUU | Val |
| CAA | Gln | CIA | Arg |
| | | CII | Arg |
| CAC | His | CIC | Arg |
| CAG | Gln | CIG | Arg |
| CAU | His | CIU | Arg |
| GAA | Glu | GIA | Gly |
| | | GII | Gly |
| GAC | Asp | GIC | Gly |
| GAG | Glu | GIG | Gly |
| GAU | Asp | GIU | Gly |
| UAA | Stop | UII | Trp |
| UGA | Stop | UGI | Trp |
| UAC | Tyr | UIC | Cys |
| UAG | Stop | UIG | Trp |
| UAU | Tyr | UIU | Cys |

TABLE 2
Target Codon Base Composition and Resulting Modified Codon

| Target Codon | Modified Codon |
|---|---|
| AAA | AIA |
| AAC | AIC |
| AAG | AIG |
| AAU | AIU |
| CAA | CIA |
| CAC | CIC |
| CAG | CIG |
| CAU | CIU |
| GAA | GIA |
| GAC | GIC |
| GAG | GIG |
| GAU | GIU |
| UAA | UIA |
| UAC | UIC |
| UAG | UIG |
| UAU | UIU |

[0247] Because the deamination of the adenosine to an inosine may result in a protein that no longer bears the mutated A at the target position, the identification of the deamination into inosine may be a functional read-out, for instance an assessment on whether a functional protein is present, or even the assessment that a disease that is caused by the presence of the adenosine is (partly) reversed. The functional assessment for each of the diseases mentioned herein will generally be according to methods known to the skilled person. When the presence of a target adenosine causes aberrant splicing, the read-out may be the assessment of whether the aberrant splicing is still taking place, or not, or less. On the other hand, when the deamination of a target adenosine is wanted to introduce a splice site, then similar approaches can be used to check whether the required type of splicing is indeed taking place. A very suitable manner to identify the presence of an inosine after deamination of the target adenosine is of course RT-PCR and sequencing, using methods that are well-known to the person skilled in the art.

[0248] In general, mutations in any target RNA that can be reversed using oligonucleotide constructs according to the invention are G-to-A mutations, and oligonucleotide constructs can be designed accordingly. Mutations that may be targeted using oligonucleotide constructs according to the invention also include C to A, U to A (T to A on the DNA level) in the case of recruiting adenosine deaminases. Although RNA editing in the latter circumstances may not necessarily revert the mutation to wild-type, the edited nucleotide may give rise to an improvement over the original mutation. For example, a mutation that causes an in frame stop codon—giving rise to a truncated protein, upon translation—may be changed into a codon coding for an amino acid that may not be the original amino acid in that position, but that gives rise to a (full length) protein with at least some functionality, at least more functionality than the truncated protein.

### Oligonucleotide Agents

[0249] The oligonucleotides for use in the methods of the present invention are complementary to target mRNA sequence, e.g., MECP2, comprising the SNP associated with a disease, e.g., Rett syndrome. In some embodiments, the guide oligonucleotides are complementary to target mRNA with the exception of at least one mismatch. The oligonucleotide includes a mismatch opposite the target adenosine.

[0250] The guide oligonucleotides are also capable of recruiting adenosine deaminase acting on RNA (ADAR) enzymes to deaminate selected adenosines on the target mRNA. In some embodiments, the oligonucleotide further comprises one or more ADAR-recruiting domains. In some embodiments, only one adenosine is deaminated. In some embodiments, 1, 2, or 3 adenosines are deaminated.

[0251] The oligonucleotides for use in the methods of the invention may further include modifications (e.g., alternative nucleotides) to increase stability and/or increase deamination efficiency.

[0252] Whenever reference is made to nucleotides in the guide oligonucleotide, such as cytosine, 5-methylcytosine, 5-hydroxymethylcytosine, Pyrrolocytidine, and -D-Glucosyl-5-hydroxy-methylcytosine are included; when reference is made to adenine, 2-aminopurine, 2,6-diaminopurine, 3-deazaadenosine, 7-deazaadenosine, 8-azidoadenosine, 8-methyladenosine, 7-aminomethyl-7-deazaguanosine, 7-deazaguanosine, N6-Methyladenine and 7-methyladenine are included; when reference is made to uracil, 5-methoxyuracil, 5-methyluracil, dihydrouracil, pseudouracil, and thienouracil, dihydrouracil, 4-thiouracil and 5-hydroxymethyluracil are included; when reference is made to guanosine, 7-methylguanosine, 8-aza-7-deazaguanosine, thienoguanosine and 1-methylguanosine are included.

[0253] Whenever reference is made to nucleosides or nucleotides, ribofuranose derivatives, such as 2′-deoxy, 2′-hydroxy, 2-fluororibose and 2′-O-substituted variants, such as 2′-O-methyl, are included, as well as other modifications, including 2′-4′ bridged variants.

[0254] Whenever reference is made to oligonucleotides, linkages between two mono-nucleotides may be phosphodiester linkages as well as modifications thereof, including, phosphodiester, phosphotriester, phosphoro(di)thioate, methylphosphonate, phosphor-amidate linkers, and the like.

### Modifications

[0255] A guide oligonucleotide according to the present invention may be chemically modified almost in its entirety, for example by modifying all nucleotides with a 2′-O-methylated sugar moiety (2′-OMe). Various chemistries and modifications are known in the field of oligonucleotides that can be readily used in accordance with the invention. The regular internucleosidic linkages between the nucleotides may be altered by mono- or di-thioation of the phosphodiester bonds to yield phosphorothioate esters or phosphorodithioate esters, respectively.

[0256] Other modifications of the internucleosidic linkages are possible, including amidation and peptide linkers. In some embodiments, the guide oligonucleotides of the present invention have one, two, three, four or more phosphorothioate linkages. It will be understood by the skilled person that the number of such linkages may vary on each end, depending on the target sequence, or based on other aspects, such as toxicity.

[0257] The ribose sugar may be modified by substitution of the 2′-O moiety with a lower alkyl (C1-4, such as 2′-O-methyl), alkenyl (C2-4), alkynyl (C2-4), methoxyethyl (2′-O-MOE), —H (as in DNA) or other substituent. Preferred substituents of the 2′-OH group are a methyl, methoxyethyl or 3,3′-dimethylallyl group. The latter is known for its property to inhibit nuclease sensitivity due to its bulkiness, while improving efficiency of hybridization (Angus & Sproat. 1993. FEBS Vol. 325, no. 1, 2, 123-7). Alternatively, locked nucleic acid sequences (LNAs), comprising a 2′-4′ intramolecular bridge (usually a methylene bridge between the 2′ oxygen and 4′ carbon) linkage inside the ribose ring, or 2′-fluoroarabinonucleosides (FANA), may be applied. Purine nucleobases and/or pyrimidine nucleobases may be modified to alter their properties, for example by amination or deamination of the heterocyclic rings. The exact chemistries and formats may vary from oligonucleotide construct to oligonucleotide construct and from application to application. It is believed that 4 or more consecutive DNA nucleotides (4 consecutive deoxyriboses) in an oligonucleotide create so-called gapmers that—when annealed to their RNA cognate sequences—induce cleavage of the target RNA by RNaseH. According to the present invention, RNaseH cleavage of the target RNA is generally to be avoided as much as possible.

[0258] Examples of chemical modifications in the guide oligonucleotides of the present invention are modifications of the sugar moiety, including by cross-linking substituents within the sugar (ribose) moiety (e.g., as in locked nucleic acids: LNA), by substitution of the 2′-O atom with alkyl (e.g. 2′-O-methyl), alkynyl (2′-O-alkynyl), alkenyl (2′-O-alkenyl), alkoxyalkyl (e.g. methoxyethyl: 2′-O-MOE) groups, having a length as specified above, and the like. In addition, the phosphodiester group of the backbone may be modified by thioation, dithioation, amidation and the like to yield phosphorothioate, phosphorodithioate, phosphoramidate, etc., internucleosidic linkages. The internucleotidic linkages may be replaced in full or in part by peptidic linkages to yield in peptidonucleic acid sequences and the like. Alternatively, or in addition, the nucleobases may be modified by (de)amination, to yield inosine or 2′6′-diaminopurines and the like. A further modification may be methylation of the C5 in the cytidine moiety of the nucleotide, to reduce potential immunogenic properties known to be associated with CpG sequences

[0259] The inventors of the present invention surprisingly discovered that relative to the editing observed for a guide oligonucleotide that is fully 2′-OMe modified with a DNA triplet, generally editing is higher for guide oligonucleotides comprising a FANA triplet.

### Mismatches

[0260] The inventors of the present invention have discovered that mismatches, wobbles and/or out-looping bulges (caused by nucleotides in the guide oligonucleotide that do not form perfect base pairs with the target RNA according to the Watson-Crick base pairing rules) are generally tolerated and may improve editing activity of the target RNA sequence. The number of mismatches, wobbles or bulges in the guide oligonucleotide of the present invention (when it hybridizes to its RNA target sequence) may be one (which may be the one mismatch formed at the target adenosine position, when a cytosine is the opposite nucleoside, or some other position in the guide oligonucleotide) or more (either including or not including the mismatch at the target adenosine), depending on the length of the guide oligonucleotide. Additional mismatches, wobbles or bulges may be upstream as well as downstream of the target adenosine. In some embodiments, a mismatch or wobble is present at position 12 nucleotides upstream (towards the 5′ end) from the targeted adenosine. In some embodiments, a mismatch or wobble is present at position 16 nucleotides upstream (towards the 5′ end) from the targeted adenosine. In some embodiments, a mismatch or wobble is present at position 17 nucleotides upstream (towards the 5′ end) from the targeted adenosine. In some embodiments, a mismatch or wobble is present at position 21 nucleotides upstream (towards the 5′ end) from the targeted adenosine. The bulges or mismatches may be at a single position (caused by one mismatching, wobble or bulge base pair) or a series of nucleotides that are not fully complementary (caused by more than one consecutive mismatching or wobble base pair or bulge, preferably two or three consecutive mismatching and/or wobble base pairs and/or bulges).

[0261] A. Alternative Oligonucleotides

[0262] In one embodiment, one or more of the nucleotides of the oligonucleotide of the invention, is naturally-occurring, and does not include, e.g., chemical modifications and/or conjugations known in the art and described herein. In another embodiment, one or more of the nucleotides of an oligonucleotide of the invention, is chemically modified to enhance stability or other beneficial characteristics (e.g., alternative nucleotides). Without being bound by theory, it is believed that certain modification can increase nuclease resistance and/or serum stability, or decrease immunogenicity. For example, polynucleotides of the invention may contain nucleotides found to occur naturally in DNA or RNA (e.g., adenine, thymidine, guanosine, cytidine, uridine, or inosine) or may contain nucleotides which have one or more chemical modifications to one or more components of the nucleotide (e.g., the nucleobase, sugar, or phospho-linker moiety). Oligonucleotides of the invention may be linked to one another through naturally-occurring phosphodiester bonds, or may be modified to be covalently linked through phosphorothiorate, 3′-methylenephosphonate, 5′-methylenephosphonate, 3′-phosphoamidate, 2′-5′ phosphodiester, guanidinium, S-methylthiourea, or peptide bonds.

[0263] In some embodiments, one or more of the nucleotides of the oligonucleotide of the invention has the structure of any one of Formula I-V:

[chemical structure]

[0264] In some embodiments, one or more of the nucleotides of the oligonucleotide of the invention has the structure of any one of Formula I, e.g., has the structure:

[chemical structure]

[0265] In some embodiments, one or more of the nucleotides of the oligonucleotide of the invention has the structure of any one of Formula II, e.g., has the structure:

[chemical structure]

[0266] In some embodiments, one or more of the nucleotides of the oligonucleotide of the invention has the structure of any one of Formula III.

[0267] In some embodiments, one or more of the nucleotides of the oligonucleotide of the invention has the structure of any one of Formula IV, e.g., has the structure:

[chemical structure]

[0268] In some embodiments, one or more of the nucleotides of the oligonucleotide of the invention has the structure of any one of Formula V, e.g., has the structure:

[chemical structure]

[0269] In certain embodiments of the invention, substantially all of the nucleotides of an oligonucleotide of the invention are alternative nucleotides. In other embodiments of the invention, all of the nucleotides of an oligonucleotide of the invention are alternative nucleotides. Oligonucleotides of the invention in which “substantially all of the nucleotides are alternative nucleotides” are largely but not wholly modified and can include no more than 5, 4, 3, 2, or 1 naturally-occurring nucleotides. In still other embodiments of the invention, oligonucleotides of the invention can include no more than 5, 4, 3, 2, or 1 alternative nucleotides.

[0270] In some embodiments, the oligonucleotides of the instant invention include the structure:

[Aₘ]-X¹-X²-X³—[Bₙ]

wherein each of A and B is a nucleotide; m and n are each, independently, an integer from 5 to 40; at least one of X¹, X², and X³ has the structure of Formula I, wherein R¹ is fluoro, hydroxy, or methoxy and N¹ is a nucleobase, or the structure of Formula V, wherein R⁴ is hydrogen and R⁵ is hydrogen; each of X¹, X², and X³ that does not have the structure of Formula I is a ribonucleotide; [Aₘ] and [Bₙ] each include at least five terminal 2′-O-methyl-nucleotides; at least four terminal phosphorothioate linkages, and at least 20% of the nucleotides of [Aₘ] and [Bₙ] combined are 2′-O-methyl-nucleotides. In some embodiments, X¹ includes an adenine nucleobase, X² includes a cytosine, 5-methylcytosine, uracil, or thymine nucleobase or does not include a nucleobase, and X³ includes an adenine nucleobase; X¹ includes an adenine nucleobase, X² includes a cytosine, 5-methylcytosine, uracil, or thymine nucleobase or does not include a nucleobase, and X³ includes a guanine or hypoxanthine nucleobase; X¹ includes an adenine nucleobase, X² includes a cytosine, 5-methylcytosine, uracil, or thymine nucleobase or does not include a nucleobase, and X³ includes a uracil or thymine nucleobase; X¹ includes an adenine nucleobase, X² includes a cytosine, 5-methylcytosine, uracil, or thymine nucleobase or does not include a nucleobase, and X³ includes a cytosine or 5-methylcytosine nucleobase; X¹ includes a guanine or hypoxanthine nucleobase, X² includes a cytosine, 5-methylcytosine, uracil, or thymine nucleobase or does not include a nucleobase, and X³ includes an adenine nucleobase; X¹ includes a guanine or hypoxanthine nucleobase, X² includes a cytosine, 5-methylcytosine, uracil, or thymine nucleobase or does not include a nucleobase, and X³ includes a guanine or hypoxanthine nucleobase; X¹ includes a guanine or hypoxanthine nucleobase, X² includes a cytosine, 5-methylcytosine, uracil, or thymine nucleobase or does not include a nucleobase, and X³ includes a uracil or thymine nucleobase; X¹ includes a guanine or hypoxanthine nucleobase, X² includes a cytosine, 5-methylcytosine, uracil, or thymine nucleobase or does not include a nucleobase, and X³ includes a cytosine or 5-methylcytosine nucleobase; X¹ includes a uracil or thymine nucleobase, X² includes a cytosine, 5-methylcytosine, uracil, or thymine nucleobase or does not include a nucleobase, and X³ includes an adenine nucleobase; X¹ includes a uracil or thymine nucleobase, X² includes a cytosine, 5-methylcytosine, uracil, or thymine nucleobase or does not include a nucleobase, and X³ includes a guanine or hypoxanthine nucleobase; X¹ includes a uracil or thymine nucleobase, X² includes a cytosine, 5-methylcytosine, uracil, or thymine nucleobase or does not include a nucleobase, and X³ includes a uracil or thymine nucleobase; X¹ includes a uracil or thymine nucleobase, X² includes a cytosine, 5-methylcytosine, uracil, or thymine nucleobase or does not include a nucleobase, and X³ includes a cytosine or 5-methylcytosine nucleobase; X¹ includes a cytosine or 5-methylcytosine nucleobase, X² includes a cytosine, 5-methylcytosine, uracil, or thymine nucleobase or does not include a nucleobase, and X³ includes an adenine nucleobase; X¹ includes a cytosine or 5-methylcytosine nucleobase, X² includes a cytosine, 5-methylcytosine, uracil, or thymine nucleobase or does not include a nucleobase, and X³ includes a guanine or hypoxanthine nucleobase; X¹ includes a cytosine or 5-methylcytosine nucleobase, X² includes a cytosine, 5-methylcytosine, uracil, or thymine nucleobase or does not include a nucleobase, and X³ includes a uracil or thymine nucleobase; or X¹ includes a cytosine or 5-methylcytosine nucleobase, X² includes a cytosine, 5-methylcytosine, uracil, or thymine nucleobase or does not include a nucleobase, and X³ includes a cytosine or 5-methylcytosine nucleobase.

[0271] In some embodiments, one or more of the nucleotides of the oligonucleotide of the invention has the structure of any one of Formula VI-XI:

[chemical structure]

[0272] In some embodiments, one or more of the nucleotides of the oligonucleotide of the invention has the structure of any one of Formula VI.

[0273] In some embodiments, one or more of the nucleotides of the oligonucleotide of the invention has the structure of any one of Formula VII.

[0274] In some embodiments, one or more of the nucleotides of the oligonucleotide of the invention has the structure of any one of Formula VIII.

[0275] In some embodiments, one or more of the nucleotides of the oligonucleotide of the invention has the structure of any one of Formula IX, e.g., has the structure:

[chemical structure]

In some embodiments, one or more of the nucleotides of the oligonucleotide of the invention has the structure of any one of Formula X, e.g., has the structure:

[chemical structure]

In some embodiments, one or more of the nucleotides of the oligonucleotide of the invention has the structure of any one of Formula XI, e.g., has the structure:

[chemical structure]

[0276] In certain embodiments of the invention, substantially all of the nucleotides of an oligonucleotide of the invention are alternative nucleotides. In other embodiments of the invention, all of the nucleotides of an oligonucleotide of the invention are alternative nucleotides. Oligonucleotides of the invention in which “substantially all of the nucleotides are alternative nucleotides” are largely but not wholly modified and can include no more than 5, 4, 3, 2, or 1 naturally-occurring nucleotides. In still other embodiments of the invention, oligonucleotides of the invention can include no more than 5, 4, 3, 2, or 1 alternative nucleotides.

[0277] In some embodiments of the invention, the oligonucleotides of the instant invention include the structure:

[Aₘ]-X¹-X²-X³—[Bₙ]

wherein each of A and B is a nucleotide; m and n are each, independently, an integer from 5 to 40; at least one of X¹, X², and X³ has the structure of Formula VI, Formula VII, Formula VIII, or Formula IX, wherein N¹ is a nucleobase and each of X¹, X², and X³ that does not have the structure of Formula VI, Formula VII, Formula VIII, or Formula IX is a ribonucleotide; [Aₘ] and [Bₙ] each include at least five terminal 2′-O-methyl-nucleotides and at least four terminal phosphorothioate linkages; and at least 20% of the nucleotides of [Aₘ] and [Bₙ] combined are 2′-O-methyl-nucleotides. In some embodiments, X¹ includes an adenine nucleobase, X² includes a cytosine, 5-methylcytosine, uracil, or thymine nucleobase or does not include a nucleobase, and X³ includes an adenine nucleobase; X¹ includes an adenine nucleobase, X² includes a cytosine, 5-methylcytosine, uracil, or thymine nucleobase or does not include a nucleobase, and X³ includes a guanine or hypoxanthine nucleobase; X¹ includes an adenine nucleobase, X² includes a cytosine, 5-methylcytosine, uracil, or thymine nucleobase or does not include a nucleobase, and X³ includes a uracil or thymine nucleobase; X¹ includes an adenine nucleobase, X² includes a cytosine, 5-methylcytosine, uracil, or thymine nucleobase or does not include a nucleobase, and X³ includes a cytosine or 5-methylcytosine nucleobase; X¹ includes a guanine or hypoxanthine nucleobase, X² includes a cytosine, 5-methylcytosine, uracil, or thymine nucleobase or does not include a nucleobase, and X³ includes an adenine nucleobase; X¹ includes a guanine or hypoxanthine nucleobase, X² includes a cytosine, 5-methylcytosine, uracil, or thymine nucleobase or does not include a nucleobase, and X³ includes a guanine or hypoxanthine nucleobase; X¹ includes a guanine or hypoxanthine nucleobase, X² includes a cytosine, 5-methylcytosine, uracil, or thymine nucleobase or does not include a nucleobase, and X³ includes a uracil or thymine nucleobase; X¹ includes a guanine or hypoxanthine nucleobase, X² includes a cytosine, 5-methylcytosine, uracil, or thymine nucleobase or does not include a nucleobase, and X³ includes a cytosine or 5-methylcytosine nucleobase; X¹ includes a uracil or thymine nucleobase, X² includes a cytosine, 5-methylcytosine, uracil, or thymine nucleobase or does not include a nucleobase, and X³ includes an adenine nucleobase; X¹ includes a uracil or thymine nucleobase, X² includes a cytosine, 5-methylcytosine, uracil, or thymine nucleobase or does not include a nucleobase, and X³ includes a guanine or hypoxanthine nucleobase; X¹ includes a uracil or thymine nucleobase, X² includes a cytosine, 5-methylcytosine, uracil, or thymine nucleobase or does not include a nucleobase, and X³ includes a uracil or thymine nucleobase; X¹ includes a uracil or thymine nucleobase, X² includes a cytosine, 5-methylcytosine, uracil, or thymine nucleobase or does not include a nucleobase, and X³ includes a cytosine or 5-methylcytosine nucleobase; X¹ includes a cytosine or 5-methylcytosine nucleobase, X² includes a cytosine, 5-methylcytosine, uracil, or thymine nucleobase or does not include a nucleobase, and X³ includes an adenine nucleobase; X¹ includes a cytosine or 5-methylcytosine nucleobase, X² includes a cytosine, 5-methylcytosine, uracil, or thymine nucleobase or does not include a nucleobase, and X³ includes a guanine or hypoxanthine nucleobase; X¹ includes a cytosine or 5-methylcytosine nucleobase, X² includes a cytosine, 5-methylcytosine, uracil, or thymine nucleobase or does not include a nucleobase, and X³ includes a uracil or thymine nucleobase; or X¹ includes a cytosine or 5-methylcytosine nucleobase, X² includes a cytosine, 5-methylcytosine, uracil, or thymine nucleobase or does not include a nucleobase, and X³ includes a cytosine or 5-methylcytosine nucleobase.

[0278] In some embodiments, one or more of the nucleotides of the oligonucleotide of the invention has the structure of any one of Formula XII-XV:

[chemical structure]

[0279] In some embodiments, one or more of the nucleotides of the oligonucleotide of the invention has the structure of any one of Formula XII, e.g., has the structure:

[chemical structure]

[0280] In some embodiments, one or more of the nucleotides of the oligonucleotide of the invention has the structure of any one of Formula XIII, e.g., has the structure:

[chemical structure]

[0281] In some embodiments, one or more of the nucleotides of the oligonucleotide of the invention has the structure of any one of Formula XIV, e.g., has the structure:

[chemical structure]

[0282] In some embodiments, one or more of the nucleotides of the oligonucleotide of the invention has the structure of any one of Formula XV.

[0283] In certain embodiments of the invention, substantially all of the nucleotides of an oligonucleotide of the invention are alternative nucleotides. In other embodiments of the invention, all of the nucleotides of an oligonucleotide of the invention are alternative nucleotides. Oligonucleotides of the invention in which “substantially all of the nucleotides are alternative nucleotides” are largely but not wholly modified and can include no more than 5, 4, 3, 2, or 1 naturally-occurring nucleotides. In still other embodiments of the invention, oligonucleotides of the invention can include no more than 5, 4, 3, 2, or 1 alternative nucleotides.

[0284] In some embodiments, the oligonucleotides of the instant invention include the structure:

[Aₘ]-X¹-X²-X³—[Bₙ]

wherein each of A and B is a nucleotide; m and n are each, independently, an integer from 5 to 40; at least of X¹, X², and X³ has the structure of Formula XIII, wherein R⁸ and R⁹ are each hydrogen, and each of X¹, X² and X³ that does not have the structure of Formula XIII is a ribonucleotide; [Aₘ] and [Bₙ] each include at least five terminal 2′-O-methyl-nucleotides and at least four terminal phosphorothioate linkages; and at least 20% of the nucleotides of [Aₘ] and [Bₙ] combined are 2′-O-methyl-nucleotides. In some embodiments, X¹ includes an adenine nucleobase, X² includes a cytosine, 5-methylcytosine, uracil, or thymine nucleobase or does not include a nucleobase, and X³ includes an adenine nucleobase; X¹ includes an adenine nucleobase, X² includes a cytosine, 5-methylcytosine, uracil, or thymine nucleobase or does not include a nucleobase, and X³ includes a guanine or hypoxanthine nucleobase; X¹ includes an adenine nucleobase, X² includes a cytosine, 5-methylcytosine, uracil, or thymine nucleobase or does not include a nucleobase, and X³ includes a uracil or thymine nucleobase; X¹ includes an adenine nucleobase, X² includes a cytosine, 5-methylcytosine, uracil, or thymine nucleobase or does not include a nucleobase, and X³ includes a cytosine or 5-methylcytosine nucleobase; X¹ includes a guanine or hypoxanthine nucleobase, X² includes a cytosine, 5-methylcytosine, uracil, or thymine nucleobase or does not include a nucleobase, and X³ includes an adenine nucleobase; X¹ includes a guanine or hypoxanthine nucleobase, X² includes a cytosine, 5-methylcytosine, uracil, or thymine nucleobase or does not include a nucleobase, and X³ includes a guanine or hypoxanthine nucleobase; X¹ includes a guanine or hypoxanthine nucleobase, X² includes a cytosine, 5-methylcytosine, uracil, or thymine nucleobase or does not include a nucleobase, and X³ includes a uracil or thymine nucleobase; X¹ includes a guanine or hypoxanthine nucleobase, X² includes a cytosine, 5-methylcytosine, uracil, or thymine nucleobase or does not include a nucleobase, and X³ includes a cytosine or 5-methylcytosine nucleobase; X¹ includes a uracil or thymine nucleobase, X² includes a cytosine, 5-methylcytosine, uracil, or thymine nucleobase or does not include a nucleobase, and X³ includes an adenine nucleobase; X¹ includes a uracil or thymine nucleobase, X² includes a cytosine, 5-methylcytosine, uracil, or thymine nucleobase or does not include a nucleobase, and X³ includes a guanine or hypoxanthine nucleobase; X¹ includes a uracil or thymine nucleobase, X² includes a cytosine, 5-methylcytosine, uracil, or thymine nucleobase or does not include a nucleobase, and X³ includes a uracil or thymine nucleobase; X¹ includes a uracil or thymine nucleobase, X² includes a cytosine, 5-methylcytosine, uracil, or thymine nucleobase or does not include a nucleobase, and X³ includes a cytosine or 5-methylcytosine nucleobase; X¹ includes a cytosine or 5-methylcytosine nucleobase, X² includes a cytosine, 5-methylcytosine, uracil, or thymine nucleobase or does not include a nucleobase, and X³ includes an adenine nucleobase; X¹ includes a cytosine or 5-methylcytosine nucleobase, X² includes a cytosine, 5-methylcytosine, uracil, or thymine nucleobase or does not include a nucleobase, and X³ includes a guanine or hypoxanthine nucleobase; X¹ includes a cytosine or 5-methylcytosine nucleobase, X² includes a cytosine, 5-methylcytosine, uracil, or thymine nucleobase or does not include a nucleobase, and X³ includes a uracil or thymine nucleobase; or X¹ includes a cytosine or 5-methylcytosine nucleobase, X² includes a cytosine, 5-methylcytosine, uracil, or thymine nucleobase or does not include a nucleobase, and X³ includes a cytosine or 5-methylcytosine nucleobase.

[0285] In some embodiments, the oligonucleotides for use in the methods of the instant invention include a recruitment domain for the ADAR enzyme (e.g., an ADAR-recruiting domain). In some embodiments, the ADAR-recruiting domain is a stem-loop structure. Such oligonucleotides may be referred to as “axiomer AONs” or “self-looping AONs.” The recruitment portion acts in recruiting a natural ADAR enzyme present in the cell to the dsRNA formed by hybridization of the target sequence with the targeting portion. The recruitment portion may be a stem-loop structure mimicking either a natural substrate (e.g. the glutamate ionotropic receptor AMPA type subunit 2 (GluR2) receptor; such as a GluR2 ADAR-recruiting domain) or a Z-DNA structure known to be recognized by the dsRNA binding regions of ADAR enzymes (e.g., a Z-DNA ADAR-recruiting domain). As GluR2 and Z-DNA ADAR-recruiting domains are high affinity binding partners to ADAR, there is no need for conjugated entities or presence of modified recombinant ADAR enzymes. A stem-loop structure can be an intermolecular stem-loop structure, formed by two separate nucleic acid strands, or an intramolecular stem loop structure, formed within a single nucleic acid strand. The stem-loop structure of the recruitment portion may be a step loop structure described in WO 2016/097212, US 2018/0208924, Merkle et al. Nature Biotechnology, 37: 133-8 (2019), Katrekar et al. Nature Methods, 16(3): 239-42 (2019), Fukuda et al. Scientific Reports, 7: 41478 (2017), the stem-loop structures of the ADAR recruitment portion of which are herein incorporated by reference. In some embodiments, the oligonucleotides include one or more ADAR-recruiting domains (e.g., 1 or 2 ADAR-recruiting domains). In some embodiments, the ADAR-recruiting domain is at the 5′ end of the oligonucleotide. In other embodiments, the ADAR-recruiting domain is at the 3′ end of said oligonucleotide. In some embodiments, the oligonucleotide includes a first ADAR-recruiting domain and a second ADAR-recruiting domain. the first ADAR-recruiting domain is at the 5′ end of said oligonucleotide, and the second ADAR-recruiting domain is at the 3′ end of said oligonucleotide.

[0286] In some embodiments, the oligonucleotide includes the structure of Formula XVI:

C-L₁-D-L₂-[Aₘ]-X¹-X²-X³—[Bₙ] Formula XVI,

wherein [Aₘ]-X¹-X²-X³—[Bₙ] is the oligonucleotide of any one of formulas I-XV; C is a single-stranded oligonucleotide of 10-50 linked nucleosides in length; L₁ is a loop region; and D is a single-stranded oligonucleotide of 10-50 linked nucleosides in length; L₂ is an optional linker; wherein the oligonucleotide includes a duplex structure formed by C and D of between 10-50 linked nucleosides in length, wherein the duplex structure includes at least one mismatch between nucleotides of C and nucleotides of D, and wherein C or D includes at least one alternative nucleobase.

[0287] In some embodiments, C and D include at least one alternative nucleobase. In other embodiments, L₁ includes linked nucleosides. In yet another embodiment, L₁ consists of linked nucleosides. In some embodiments, L₁ includes at least one alternative nucleobase, at least one alternative internucleoside linkage, and/or at least one alternative sugar moiety. In some embodiments, C or D includes at least one alternative internucleoside linkage and/or at least one alternative sugar moiety. In some embodiments, C and D each independently includes at least one alternative internucleoside linkage and/or at least one alternative sugar moiety.

[0288] In some embodiments, the oligonucleotide includes the structure of Formula XVII:

C-L₁-D-L₂-[Aₘ]-X¹-X²-X³—[Bₙ] Formula XVII,

wherein [Aₘ]-X¹—X²-X³—[Bₙ] is the oligonucleotide of any one of Formulas I-XV; C is a single-stranded oligonucleotide of 10-50 linked nucleosides in length; L₁ is a loop region that does not consist of linked nucleosides; and D is a single-stranded oligonucleotide of 10-50 linked nucleosides in length; L₂ is an optional linker, wherein the oligonucleotide includes a duplex structure formed by C and D of between 10-50 linked nucleosides in length, and wherein the duplex structure includes at least one mismatch between nucleotides of C and nucleotides of D.

[0289] In some embodiments, L₁ has the structure of Formula XVIII:

F¹-(G¹)ⱼ-(H¹)ₖ-(G²)ₘ-(I)-(G³)ₙ-(H²)ₚ-(G⁴)_{q}-F² Formula XVIII,

wherein F¹ is a bond between the loop region and C; F² is a bond between D and [Aₘ] or between D and, optionally, the linker; G¹, G², G³, and G⁴ each, independently, is selected from optionally substituted C₁-C₂ alkyl, optionally substituted C1-C3 heteroalkyl, O, S, and NR^{N}; R^{N} is hydrogen, optionally substituted C₁₋₄ alkyl, optionally substituted C₂₋₄ alkenyl, optionally substituted C₂₋₄ alkynyl, optionally substituted C₂₋₆ heterocyclyl, optionally substituted C₆₋₁₂ aryl, or optionally substituted C₁₋₇ heteroalkyl; C¹ and C² are each, independently, selected from carbonyl, thiocarbonyl, sulphonyl, or phosphoryl; j, k, m, n, p, and q are each, independently, 0 or 1; and I is optionally substituted C₁₋₁₀ alkyl, optionally substituted C₂₋₁₀ alkenyl, optionally substituted C₂₋₁₀ alkynyl, optionally substituted C₂₋₆ heterocyclyl, optionally substituted C₆₋₁₂ aryl, optionally substituted C₂-C₁₀ polyethylene glycol, or optionally substituted C₁₋₁₀ heteroalkyl, or a chemical bond linking F¹-(G¹)ⱼ-(H¹)k-(G²)ₘ-(I)-(G³)ₙ-(H²)ₚ-(G⁴)_{q}-F².

[0290] In some embodiments, L₁ includes a carbohydrate-containing linking moiety.

[0291] In some embodiments, C or D each includes at least one alternative nucleobase, at least one alternative internucleoside linkage, and/or at least one alternative sugar moiety. In some embodiments, C and D each includes at least one alternative nucleobase, at least one alternative internucleoside linkage, and/or at least one alternative sugar moiety.

[0292] In some embodiments, the oligonucleotide includes the structure of Formula XIX:

C-L₁-D-L₂-[Aₘ]-X¹-X²-X³—[Bₙ] Formula XIX,

wherein [Aₘ]-X¹-X²-X³—[Bₙ] is the oligonucleotide of any one of formulas I to XV; C is a single-stranded oligonucleotide of 10-50 linked nucleosides in length; L₁ is a loop region including at least one alternative nucleobase or at least one alternative internucleoside linkage; and D is a single-stranded oligonucleotide of 10-50 linked nucleosides in length; L₂ is an optional linker, wherein the oligonucleotide includes a duplex structure formed by C and D of between 10-50 linked nucleosides in length, and wherein the duplex structure includes at least one mismatch between nucleotides of C and nucleotides of D.

[0293] In some embodiments, L₁ includes at least one alternative nucleobase and at least one alternative internucleoside linkage.

[0294] In some embodiments, the oligonucleotide includes the structure of Formula XX:

C-L₁-D-L₂-[Aₘ]-X¹-X²-X³—[Bₙ] Formula XX,

wherein [Aₘ]-X¹-X²-X³—[Bₙ] is the oligonucleotide of any one of formulas I to XV; C is a single-stranded oligonucleotide of 10-50 linked nucleosides in length; L₁ is a loop region including at least one alternative sugar moiety, wherein the alternative sugar moiety is selected from the group consisting of a 2′-O—C₁-C₆ alkyl-sugar moiety, a 2′-amino-sugar moiety, a 2′-fluoro-sugar moiety, a 2′-O-MOE sugar moiety, an arabino nucleic acid (ANA) sugar moiety, a deoxyribose sugar moiety, and a bicyclic nucleic acid; D is a single-stranded oligonucleotide of 10-50 linked nucleosides in length; and L₂ is an optional linker, wherein the oligonucleotide includes a duplex structure formed by C and D of between 10-50 linked nucleosides in length, and wherein the duplex structure includes at least one mismatch between nucleotides of C and nucleotides of D.

[0295] In some embodiments, the bicyclic sugar moiety is selected from an oxy-LNA sugar moiety (also referred to as an “LNA sugar moiety”), a thio-LNA sugar moiety, an amino-LNA sugar moiety, a cEt sugar moiety, and an ethylene-bridged (ENA) sugar moiety. In some embodiments, the ANA sugar moiety is a 2′-fluoro-ANA sugar moiety.

[0296] In some embodiments, C or D includes at least one alternative nucleobase, at least one alternative internucleoside linkage, and/or at least one alternative sugar moiety. In some embodiments, C and D each includes at least one alternative nucleobase, at least one alternative internucleoside linkage, and/or at least one alternative sugar moiety. In some embodiments, C is complementary to at least 5 contiguous nucleobases of D. In some embodiments, at least 80% (e.g., at least 85%, at least 90%, at least 95%) of the nucleobases of C are complementary to the nucleobases of D.

[0297] In some embodiments, C includes a nucleobase sequence having at least 80% sequence identity to a nucleobase sequence set forth in any one of SEQ ID NO. 1, 4, 7, 10, 13, 16, 19, 22, 25, 28, 31, and 34.

[0298] In some embodiments, D includes a nucleobase sequence having at least 80% sequence identity to a nucleobase sequence set forth in any one of SEQ ID NOs. 2, 5, 8, 11, 14, 17, 20, 23, 26, 29, 32, and 35.

[0299] In some embodiments, C-L₁-D includes a nucleobase sequence having at least 80% sequence identity to a nucleobase sequence set forth in any one of SEQ ID NOs. 3, 6, 9, 12, 15, 18, 21, 24, 27, 30, 33, and 36.

[0300] In some embodiments, the at least one alternative nucleobase is selected from the group consisting of 5-methylcytosine, 5-hydroxycytosine, 5-methoxycytosine, N4-methylcytosine, N3-Methylcytosine, N4-ethylcytosine, pseudoisocytosine, 5-fluorocytosine, 5-bromocytosine, 5-iodocytosine, 5-aminocytosine, 5-ethynylcytosine, 5-propynylcytosine, pyrrolocytosine, 5-aminomethylcytosine, 5-hydroxymethylcytosine, naphthyridine, 5-methoxyuracil, pseudouracil, dihydrouracil, 2-thiouracil, 4-thiouracil, 2-thiothymine, 4-thiothymine, 5,6-dihydrothymine, 5-halouracil, 5-propynyluracil, 5-aminomethyluracil, 5-hydroxymethyluracil, hypoxanthine, 7-deazaguanine, 8-aza-7-deazaguanine, 7-aza-2,6-diaminopurine, thienoguanine, N1-methylguanine, N2-methylguanine, 6-thioguanine, 8-methoxyguanine, 8-allyloxyguanine, 7-aminomethyl-7-deazaguanine, 7-methylguanine, imidazopyridopyrimidine, 7-deazaadenine, 3-deazaadenine, 8-aza-7-deazaadenine, 8-aza-7-deazaadenine, N1-methyladenine, 2-methyladenine, N6-methyladenine, 7-methyladenine, 8-methyladenine, or 8-azidoadenine.

[0301] In some embodiments, the at least one alternative nucleobase is selected from the group consisting of 2-amino-purine, 2,6-diamino-purine, 3-deaza-adenine, 7-deaza-adenine, 7-methyl-adenine, 8-azido-adenine, 8-methyl-adenine, 5-hydroxymethyl-cytosine, 5-methyl-cytosine, pyrrolo-cytosine, 7-aminomethyl-7-deaza-guanine, 7-deaza-guanine, 7-methyl-guanine, 8-aza-7-deaza-guanine, thieno-guanine, hypoxanthine, 4-thio-uracil, 5-methoxy-uracil, dihydro-uracil, or pseudouracil.

[0302] In some embodiments, the at least one alternative internucleoside linkage is selected from the group consisting of a phosphorothioate internucleoside linkage, a 2′-alkoxy internucleoside linkage, and an alkyl phosphate internucleoside linkage. In some embodiments, the at least one alternative internucleoside linkage is at least one phosphorothioate internucleoside linkage.

[0303] In some embodiments, the at least one alternative sugar moiety is selected from the group consisting of a 2′-O-alkyl-sugar moiety, a 2′-O-methyl-sugar moiety, a 2′-amino-sugar moiety, a 2′-fluoro-sugar moiety, a 2′-O-MOE sugar moiety, an ANA sugar moiety deoxyribose sugar moiety, and a bicyclic nucleic acid. In some embodiments, the bicyclic sugar moiety is selected from an oxy-LNA sugar moiety, a thio-LNA sugar moiety, an amino-LNA sugar moiety, a cEt sugar moiety, and an ethylene-bridged (ENA) sugar moiety. In some embodiments, the ANA sugar moiety is a 2′-fluoro-ANA sugar moiety. In some embodiments, the at least one alternative sugar moiety is a 2′-O-methyl-sugar moiety, a 2′-fluoro-sugar moiety, or a 2′-O-MOE sugar moiety.

[0304] In some embodiments, the at least one mismatch is a paired A to C mismatch, a paired G to G mismatch, or a paired C to A mismatch. In some embodiments, the oligonucleotide includes at least two mismatches between nucleotides of C and nucleotides of D.

[0305] In some embodiments, the at least two mismatches are separated by at least three linked nucleosides. In some embodiments, the at least two mismatches are separated by three linked nucleosides.

[0306] In some embodiments, the at least one mismatch includes a nucleoside having an alternative nucleobase. In some embodiments, the alternative nucleobase has the structure:

[chemical structure]

wherein R¹ is hydrogen, trifluoromethyl, optionally substituted amino, hydroxyl, or optionally substituted C₁-C₆ alkoxy; R² is hydrogen, optionally substituted amino, or optionally substituted C₁-C₆ alkyl; and R³ and R⁴ are, independently, hydrogen, halogen, or optionally substituted C₁-C₆alkyl, or a salt thereof.

[0307] In one embodiment, the oligonucleotides of the invention include those including an ADAR-recruiting domain having a structure of Formula XXXIV:

C-L₁-D, Formula XXXIV,

wherein C is a single-stranded oligonucleotide of about 10-50 linked nucleosides in length (e.g., about 10, 15, 20, 25, 30, 35, 40, 45, 46, 47, 48, 49, or 50 linked nucleosides in length), L₁ is a loop region, and D is a single-stranded oligonucleotide of about 10-50 linked nucleosides in length (e.g., about 10, 15, 20, 25, 30, 35, 40, 45, 46, 47, 48, 49, or 50 linked nucleosides in length).

[0308] In some embodiments, C includes a region that is complementary to D such that the two strands hybridize and form a duplex under suitable conditions. Generally, the duplex structure is between 5 and 50 linked nucleosides in length, e.g., between, 5-49, 5-45, 5-40, 5-35, 5-30, 5-25, 5-20, 5-15, 5-10, 5-6, 8-50, 8-45, 8-40, 8-35, 8-30, 8-25, 8-20, 8-15, 8-10, 15-50, 15-45, 15-40, 15-35, 15-30, 15-25, 15-20, 15-16, 20-50, 20-45, 20-40, 20-35, 20-30, 20-25, 25-50, 25-45, 25-40, 25-35, or 25-30 linked nucleosides in length. Ranges and lengths intermediate to the above-recited ranges and lengths are also contemplated to be part of the invention. In some embodiments, C is complementary to at least 5 contiguous nucleobases (e.g., 5, 10, 15, 20, 25, 30, or more contiguous nucleobases) of D, and the oligonucleotide forms a duplex structure of between 10-50 linked nucleosides in length (e.g., at least 10, 15, 20, 25, 30, 35, 40, 45, 46, 47, 48, 49, or 50 linked nucleosides in length).

[0309] In some embodiments, the duplex structure includes at least one mismatch between nucleotides of C and nucleotides of D (e.g., at least 1, 2, 3, 4, or 5 mismatches). In some embodiments, the mismatch is a paired A to C mismatch. In some embodiments, the A nucleoside of the A to C mismatch is on the C strand and the C nucleoside of the A to C mismatch is on the D strand. In some embodiments, the A nucleoside of the A to C mismatch is on the D strand and the C nucleoside of the A to C mismatch is on the C strand. In other embodiments, the mismatch is a paired G-to-G mismatch. In still yet other embodiments, the mismatch is a paired C to A mismatch. In some embodiments, the C nucleoside of the C to A mismatch is on the C strand and the A nucleoside of the C to A mismatch is on the D strand. In some embodiments, the C nucleoside of the C to A mismatch is on the D strand and the A nucleoside of the C to A mismatch is on the C strand. In some embodiments, the mismatch is a paired I to I mismatch. In some embodiments, the mismatch is a paired I to G mismatch. In some embodiments, the I nucleoside of the I to G mismatch is on the C strand and the G nucleoside of the I to G mismatch is on the D strand. In some embodiments, the I nucleoside of the I to G mismatch is on the D strand and the G nucleoside of the I to G mismatch is on the C strand. In some embodiments, the mismatch is a paired G to I mismatch. In some embodiments, the G nucleoside of the G to I mismatch is on the C strand and the I nucleoside of the G to I mismatch is on the D strand. In some embodiments, the G nucleoside of the G to I mismatch is on the D strand and the I nucleoside of the G to I mismatch is on the C strand. In some embodiments, the mismatch includes a nucleoside having an alternative nucleobase. In some embodiments, the alternative nucleobase has the structure:

[chemical structure]

[0310] wherein R¹ is hydrogen, trifluoromethyl, optionally substituted amino, hydroxyl, or optionally substituted C₁-C₆ alkoxy; R² is hydrogen, optionally substituted amino, or optionally substituted C₁-C₆ alkyl; and R³ and R⁴ are, independently, hydrogen, halogen, or optionally substituted C₁-C₆ alkyl, or a salt thereof. In some embodiments, R¹ is a hydrogen bond donor group (e.g., a hydroxyl group, an amino group). In some embodiments, R¹ is a hydrogen bond accepting group (e.g., an alkoxy group).

[0311] In some embodiments, the duplex structure includes two mismatches. In some embodiments, the mismatches are at least three linked nucleosides apart. For example, when mismatches are “separated by 3 nucleotides,” the oligonucleotide includes the structure M₁-N₁N₂-N₃-M₂, where M₁ is the first mismatch, N₁, N₂, and N₃ are paired nucleobases, and M₂ is the second mismatch. In some embodiments M₁ is a paired A to C mismatch and M₂ is a paired G-to-G mismatch.

[0312] In some embodiments, the loop region, Li, includes linked nucleosides. In some embodiments, L₁ includes at least one alternative nucleobase, at least one alternative internucleoside linkage, and/or at least one alternative sugar moiety.

[0313] In other embodiments, the loop region has the structure of Formula XVIII:

F¹-(G¹)ⱼ-(H¹)ₖ-(G²)ₘ-(I)-(G³)ₙ-(H²)ₚ-(G⁴)_{q}-F² Formula XVIII,

wherein F¹ is a bond between the loop region and C; F² is a bond between D and a nucleotide or between D and, optionally, a linker; G¹, G², G³, and G⁴ each, independently, is selected from optionally substituted C₁-C₂ alkyl, optionally substituted C₁-C₃ heteroalkyl, O, S, and NR^{N}; R^{N} is hydrogen, optionally substituted C₁-4 alkyl, optionally substituted C₂₋₄ alkenyl, optionally substituted C₂₋₄ alkynyl, optionally substituted C₂₋₆ heterocyclyl, optionally substituted C₆₋₁₂ aryl, or optionally substituted C₁₋₇ heteroalkyl; C¹ and C² are each, independently, selected from carbonyl, thiocarbonyl, sulphonyl, or phosphoryl; j, k, m, n, p, and q are each, independently, 0 or 1; and I is optionally substituted C₁₋₁₀ alkyl, optionally substituted C₂₋₁₀ alkenyl, optionally substituted C₂₋₁₀ alkynyl, optionally substituted C₂₋₆ heterocyclyl, optionally substituted C₆₋₁₂ aryl, optionally substituted C₂-C₁₀ polyethylene glycol, or optionally substituted C₁₋₁₀ heteroalkyl, or a chemical bond linking F¹-(G¹)ⱼ-(H¹)ₖ-(G²)ₘ-(I)-(G³)ₙ-(H²)ₚ-(G⁴)_{q}-F². In some embodiments, the linker is optional.

[0314] In some embodiments, the loop region, L₁ includes a carbohydrate-containing linking moiety.

[0315] In one embodiment, one or more of the nucleotides of the oligonucleotides of the invention, is naturally-occurring, and does not include, e.g., chemical modifications and/or conjugations known in the art and described herein. In another embodiment, one or more of the nucleotides of an oligonucleotide of the invention is chemically modified to enhance stability or other beneficial characteristics (e.g., alternative nucleotides). Without being bound by theory, it is believed that certain modification can increase nuclease resistance and/or serum stability, or decrease immunogenicity. For example, polynucleotides of the invention may contain nucleotides found to occur naturally in DNA or RNA (e.g., adenine, thymidine, guanosine, cytidine, uridine, or inosine) or may contain nucleotides which have one or more chemical modifications to one or more components of the nucleotide (e.g., the nucleobase, sugar, or phospho-linker moiety). Oligonucleotides of the invention may be linked to one another through naturally-occurring phosphodiester bonds, or may be modified to be covalently linked through phosphorothiorate, 3′-methylenephosphonate, 5′-methylenephosphonate, 3′-phosphoamidate, 2′-5′ phosphodiester, guanidinium, S-methylthiourea, or peptide bonds.

[0316] In some embodiments, C includes at least one alternative nucleobase, at least one alternative internucleoside linkage, and/or at least one alternative sugar moiety. In other embodiments, D includes at least one alternative nucleobase, at least one alternative internucleoside linkage, and/or at least one alternative sugar moiety. In some embodiments, both C and D each include at least one alternative nucleobase, at least one alternative internucleoside linkage, and/or at least one alternative sugar moiety.

[0317] In certain embodiments of the invention, substantially all of the nucleotides of an oligonucleotide of the invention are alternative nucleotides. In other embodiments of the invention, all of the nucleotides of an oligonucleotide of the invention are alternative nucleotides. Oligonucleotides of the invention in which “substantially all of the nucleotides are alternative nucleotides” are largely but not wholly modified and can include no more than 5, 4, 3, 2, or 1 naturally-occurring nucleotides. In still other embodiments of the invention, an oligonucleotide of the invention can include no more than 5, 4, 3, 2, or 1 alternative nucleotides.

[0318] In one embodiment, the oligonucleotides of the invention include an ADAR-recruiting domain having the structure of Formula XXXIV, wherein C is a single-stranded oligonucleotide of 10-50 linked nucleosides in length, L₁ is a loop region, and D is a single-stranded oligonucleotide of 10-50 linked nucleosides in length. In some embodiments, C is complementary to at least 5 contiguous nucleobases of D, and the oligonucleotide includes a duplex structure formed by C and D of between 10-50 linked nucleosides in length. In some embodiments, the duplex structure includes at least one mismatch. In some embodiments, C or D includes at least one alternative nucleobase. In some embodiments, C and D each include at least one alternative nucleobase. In some embodiments, C and/or D, independently, further include at least one alternative internucleoside linkage and/or at least one alternative sugar moiety. In some embodiments, L₁ includes linked nucleotides. In other embodiments, Li consists of linked nucleosides. In some embodiments, L₁ includes at least one alternative nucleobase, at least one alternative internucleoside linkage, and/or at least one alternative sugar moiety.

[0319] In another embodiment, the oligonucleotides of the invention include an ADAR-recruiting domain having the structure of Formula XXXIV, wherein C is a single-stranded oligonucleotide of 10-50 linked nucleosides in length, L₁ is a loop region that does not consist of linked nucleosides, and D is a single-stranded oligonucleotide of 10-50 linked nucleosides in length. In some embodiments, C is complementary to at least 5 contiguous nucleobases of D, and the oligonucleotide includes a duplex structure formed by C and D of between 10-50 linked nucleosides in length. In some embodiments, the duplex structure includes at least one mismatch. In some embodiments, L₁ has the structure of Formula VIII, as described herein. In some embodiments, L₁ includes a carbohydrate-containing linking moiety. In some embodiments, C and/or D, independently, include at least one alternative nucleobase, at least one alternative internucleoside linkage, and/or at least one alternative sugar moiety.

[0320] In another embodiment, the oligonucleotides of the invention include an ADAR-recruiting domain having the structure of Formula XXXIV, wherein C is a single-stranded oligonucleotide of 10-50 linked nucleosides in length, L₁ is a loop region including at least one alternative nucleobase or at least one alternative internucleoside linkage, and D is a single-stranded oligonucleotide of 10-50 linked nucleosides in length. In some embodiments, C is complementary to at least 5 contiguous nucleobases of D, and the oligonucleotide includes a duplex structure formed by C and D of between 10-50 linked nucleosides in length. In some embodiments, the duplex structure includes at least one mismatch. In some embodiments, Li includes at least one alternative nucleobase and at least one alternative internucleoside linkage.

[0321] In another embodiment, the oligonucleotides of the invention include an ADAR-recruiting domain having the structure of Formula XXXIV, wherein C is a single-stranded oligonucleotide of 10-50 linked nucleosides in length, L₁ is a loop region including, at least one alternative sugar moiety that is not a 2′-O-methyl sugar moiety (e.g., the alternative sugar moiety is selected from the group consisting of a 2′-O—C₁-C₆ alkyl-sugar moiety, a 2′-amino-sugar moiety, a 2′-fluoro-sugar moiety, a 2′-O-MOE sugar moiety, an LNA sugar moiety, an arabino nucleic acid (ANA) sugar moiety, a 2′-fluoro-ANA sugar moiety, a deoxyribose sugar moiety, and a bicyclic nucleic acid), and D is a single-stranded oligonucleotide of 10-50 linked nucleosides in length. In some embodiments, C is complementary to at least 5 contiguous nucleobases of D, and the oligonucleotide includes a duplex structure formed by C and D of between 10-50 linked nucleosides in length. In some embodiments, the duplex structure includes at least one mismatch. In some embodiments, C and/or D, independently, include at least one alternative nucleobase, at least one alternative internucleoside linkage, and/or at least one alternative sugar moiety.

[0322] In some embodiments, C includes a nucleobase sequence having at least 50% sequence identity (e.g., at least 50%, at least 60%, at least 70%, at least 80%, at least 85%, at least 90%, at least 95%, at least 96%, at least 97%, at least 98%, at least 99%, or 100% sequence identity) to a nucleobase sequence set forth in of any one of SEQ ID NOs. 1, 4, 7, 10, 13, 16, 19, 22, 25, 28, 31, and 34, and D includes a nucleobase sequence complementary to the nucleobase sequence of C, wherein the sequence includes at least one mismatch as described herein. In other embodiments, D includes a nucleobase sequence having at least 50% sequence identity (e.g., at least 50%, at least 60%, at least 70%, at least 80%, at least 85%, at least 90%, at least 95%, at least 96%, at least 97%, at least 98%, at least 99%, or 100% sequence identity) to a nucleobase sequence set forth in of any one of SEQ ID NOs. 2, 5, 8, 11, 14, 17, 20, 23, 26, 29, 32, and 35, and C includes a nucleobase sequence complementary to the nucleobase sequence of C, wherein the sequence includes at least one mismatch as described herein. In some embodiments, C-L₁-D includes a nucleobase sequence having at least 50% sequence identity (e.g., at least 50%, at least 60%, at least 70%, at least 80%, at least 85%, at least 90%, at least 95%, at least 96%, at least 97%, at least 98%, at least 99%, or 100% sequence identity) to a nucleobase sequence set forth in of any one of SEQ ID NOs. 3, 6, 9, 12, 15, 18, 21, 24, 27, 30, 33, and 36, wherein the sequence includes at least one mismatch as described herein.

[0323] Nucleobase sequences of SEQ ID NOs. 1-36 are provided below:

TABLE 3

| | |
|---|---|
| GGUGAAUAGUAUAACAAUAU | SEQ ID NO. 1 |
| AUGUUGUUAUAGUAUCCACC | SEQ ID NO. 2 |
| GGUGAAUAGUAUAACAAUAUGCUAAAUGUUGUUAU | SEQ ID NO. 3 |
| AGUAUCCACC | |
| GGUGAAGAGGAGAACAAUAU | SEQ ID NO. 4 |
| AUGUUGUUCUCGUCUCCACC | SEQ ID NO. 5 |
| GGUGAAGAGGAGAACAAUAUGCUAAAUGUUGUUCU | SEQ ID NO. 6 |
| CGUCUCCACC | |
| GGUGUCGAGAAGAGGAGAACAAUAU | SEQ ID NO. 7 |
| AUGUUGUUCUCGUCUCCUCGACACC | SEQ ID NO. 8 |
| GGUGUCGAGAAGAGGAGAACAAUAUGCUAAAUGUU | SEQ ID NO. 9 |
| GUUCUCGUCUCCUCGACACC | |
| GGGUGGAAUAGUAUAACAAUAU | SEQ ID NO. 10 |
| AUGUUGUUAUAGUAUCCCACCU | SEQ ID NO. 11 |
| GGGUGGAAUAGUAUAACAAUAUGCUAAAUGUUGUU | SEQ ID NO. 12 |
| AUAGUAUCCCACCU | |
| GUGGAAUAGUAUAACAAUAU | SEQ ID NO. 13 |
| AUGUUGUUAUAGUAUCCCAC | SEQ ID NO. 14 |
| GUGGAAUAGUAUAACAAUAUGCUAAAUGUUGUUAU | SEQ ID NO. 15 |
| AGUAUCCCAC | |
| GGUGUCGAGAAUAGUAUAACAAUAU | SEQ ID NO. 16 |
| AUGUUGUUAUAGUAUCCUCGACACC | SEQ ID NO. 17 |
| GGUGUCGAGAAUAGUAUAACAAUAUGCUAAAUGUU | SEQ ID NO. 18 |
| GUUAUAGUAUCCUCGACACC | |
| GGGUGGAAUAGUAUAACAAUAU | SEQ ID NO. 19 |
| AUGUUGUUAUAGUAUCCCACCU | SEQ ID NO. 20 |
| GGGUGGAAUAGUAUAACAAUAUGCUAAAUGUUGUU | SEQ ID NO. 21 |
| AUAGUAUCCCACCU | |
| GGGUGGAAUAGUAUACCA | SEQ ID NO. 22 |
| UGGUAUAGUAUCCCACCU | SEQ ID NO. 23 |
| GGGUGGAAUAGUAUACCAUUCGUGGUAUAGUAUCC | SEQ ID NO. 24 |
| CACCU | |
| GUGGGUGGAAUAGUAUACCA | SEQ ID NO. 25 |
| UGGUAUAGUAUCCCACCUAC | SEQ ID NO. 26 |
| GUGGGUGGAAUAGUAUACCAUUCGUGGUAUAGUAU | SEQ ID NO. 27 |
| CCCACCUAC | |
| UGGGUGGAAUAGUAUACCA | SEQ ID NO. 28 |
| UGGUAUAGUAUCCCACCUA | SEQ ID NO. 29 |
| UGGGUGGAAUAGUAUACCAUUCGUGGUAUAGUAUC | SEQ ID NO. 30 |
| CCACCUA | |
| GGUGGAAUAGUAUACCA | SEQ ID NO. 31 |
| UGGUAUAGUAUCCCACC | SEQ ID NO. 32 |
| GGUGGAAUAGUAUACCAUUCGUGGUAUAGUAUCCC | SEQ ID NO. 33 |
| ACC | |
| GUGGAAUAGUAUACCA | SEQ ID NO. 34 |
| UGGUAUAGUAUCCCAC | SEQ ID NO. 35 |
| GUGGAAUAGUAUACCAUUCGUGGUAUAGUAUCCCA | SEQ ID NO. 36 |
| C | |

[0324] It will be understood that, although the sequences in SEQ ID NOs. 1-36 are described as unmodified and/or un-conjugated sequences, the RNA of the oligonucleotides of the invention may include any one of the sequences set forth in SEQ ID NOs. 1-36 that is an alternative nucleoside and/or conjugated as described in detail below.

[0325] In some embodiments, the oligonucleotide of the invention may further include a 5′ cap structure. In some embodiments, the 5′ cap structure is a 2,2,7-trimethylguanosine cap.

[0326] An oligonucleotide of the invention can be synthesized by standard methods known in the art as further discussed below, e.g., by use of an automated DNA synthesizer, such as are commercially available from, for example, Biosearch, Applied Biosystems, Inc.

[0327] The oligonucleotide compound can be prepared using solution-phase or solid-phase organic synthesis or both. Organic synthesis offers the advantage that the oligonucleotide including unnatural or alternative nucleotides can be easily prepared. Single-stranded oligonucleotides of the invention can be prepared using solution-phase or solid-phase organic synthesis or both.

[0328] Further, it is contemplated that for any sequence identified herein, further optimization could be achieved by systematically either adding or removing linked nucleosides to generate longer or shorter sequences. Further still, such optimized sequences can be adjusted by, e.g., the introduction of alternative nucleosides, alternative sugar moieties, and/or alternative internucleosidic linkages as described herein or as known in the art, including alternative nucleosides, alternative sugar moieties, and/or alternative internucleosidic linkages as known in the art and/or discussed herein to further optimize the molecule (e.g., increasing serum stability or circulating half-life, increasing thermal stability, enhancing transmembrane delivery, targeting to a particular location or cell type, and/or increasing interaction with RNA editing enzymes (e.g., ADAR)).

[0329] In some embodiments, the one or more ADAR-recruiting domains are GluR2 ADAR-recruiting domains. In some embodiments, the GluR2 ADAR-recruiting domain has the nucleotide sequence of SEQ ID NO. 37, as shown below in the 5′ to 3′ direction:

(SEQ ID NO. 37)
GGUGAAUAGUAUAACAAUAUGCUAAAUGUUGUUAUAGUAUCCACC

[0330] In some embodiments, the oligonucleotide includes the structure of Formula XXI (SEQ ID NO: 37), as shown below:

[chemical structure]

wherein [ASO] includes any of the oligonucleotides of the instant invention, wherein m designates a mismatched nucleotide. In some embodiments, the GluR2 ADAR-recruiting domain has the nucleotide sequence of SEQ ID NO. 38, as shown below in the 5′ to 3′ direction:

(SEQ ID NO. 38)
GGUGAAGAGGAGAACAAUAUGCUAAAUGUUGUUCUCGUCUCCACC

[0331] In some embodiments, the oligonucleotide includes the structure of Formula XXII (SEQ ID NO: 38), as shown below:

[chemical structure]

wherein [ASO] includes any of the oligonucleotides of the instant invention, wherein m designates a mismatched nucleotide. In some embodiments, the GluR2 ADAR-recruiting domain has the nucleotide sequence of SEQ ID NO. 39, as shown below in the 5′ to 3′ direction:

(SEQ ID NO. 39)
GGUGUCGAGAAGAGGAGAACAAUAUGCUAAAUGUUGUUCUCGUCUCCUC
GACACC

[0332] In some embodiments, the oligonucleotide includes the structure of Formula XXIII (SEQ ID NO: 39), as shown below:

[chemical structure]

wherein [ASO] includes any of the oligonucleotides of the instant invention, wherein m designates a mismatched nucleotide.

[0333] In some embodiments, the GluR2 ADAR-recruiting domain has the nucleotide sequence of SEQ ID NO. 40, as shown below in the 5′ to 3′ direction:

(SEQ ID NO. 40)
*s*s*G**GAGAAGAGGAGAA*AA*A*G**AAA*G**G*****G*****
**GA*A**

wherein * is a 2′-O-methyl nucleotide and s is a phosphorothioate internucleoside linkage between two linked nucleotides. In some embodiments, the oligonucleotide includes the structure of Formula XXIV (SEQ ID NO: 40), as shown below:

[chemical structure]

wherein [ASO] includes any one of the oligonucleotides presented herein, wherein * is a 2′-O-methyl nucleotide, wherein s is a phosphorothioate internucleoside linkage, wherein m designates a mismatched nucleotide. In some embodiments, the ADAR-recruiting domains further include at least one nuclease-resistant nucleotide (e.g., 2′-O-methyl nucleotide). In some embodiments, the ADAR-recruiting domains include at least one alternative internucleoside linkage (e.g., a phosphorothioate internucleoside linkage). In some embodiments, the GluR2 ADAR-recruiting domain has the nucleotide sequence of SEQ ID NO. 41, as shown below in the 5′ to 3′ direction:

(SEQ ID NO. 41)
GGGUGGAAUAGUAUAACAAUAUGCUAAAUGUUGUUAUAGUAUCCCACCU

[0334] In some embodiments, the oligonucleotide includes the structure of Formula XXV (SEQ ID NO: 41), as shown below:

[chemical structure]

wherein [ASO] includes any of the oligonucleotides of the instant invention, wherein m designates a mismatched nucleotide. In some embodiments, the GluR2 ADAR-recruiting domain has the nucleotide sequence of SEQ ID NO. 42, as shown below in the 5′ to 3′ direction:

(SEQ ID NO. 42)
GUGGAAUAGUAUAACAAUAUGCUAAAUGUUGUUAUAGUAUCCCAC

[0335] In some embodiment, the oligonucleotide includes the structure formula XXVI(SEQ ID NO: 42), as shown below:

[chemical structure]

wherein [ASO] includes any of the oligonucleotides of the instant invention, wherein m designates a mismatched nucleotide. In some embodiments, the GluR2 ADAR-recruiting domain has the nucleotide sequence of SEQ ID NO. 43, as shown below in the 5′ to 3′ direction:

(SEQ ID NO. 43)
GGUGUCGAGAAUAGUAUAACAAUAUGCUAAAUGUUGUUAUAGUAUCCUC
GACACC

[0336] In some embodiments, the oligonucleotide includes the structure of Formula XXVII (SEQ ID NO: 43), as shown below:

[chemical structure]

wherein [ASO] includes any of the oligonucleotides of the instant invention, wherein m designates a mismatched nucleotide. In some embodiments, the GluR2 ADAR-recruiting domain has the nucleotide sequence of SEQ ID NO. 44, as shown below in the 5′ to 3′ direction:

(SEQ ID NO. 44)
GGGUGGAAUAGUAUAACAAUAUGCUAAAUGUUGUUAUAGUAUCCCACCU

[0337] In some embodiments, the oligonucleotide includes the structure of Formula XXVIII (SEQ ID NO: 44), as shown below:

[chemical structure]

wherein [ASO] includes any of the oligonucleotides of the instant invention, wherein m designates a mismatched nucleotide. In some embodiments, the GluR2 ADAR-recruiting domain has the nucleotide sequence of SEQ ID NO. 45, as shown below in the 5′ to 3′ direction:

(SEQ ID NO. 45)
GGGUGGAAUAGUAUACCAUUCGUGGUAUAGUAUCCCACCU

[0338] In some embodiments, the oligonucleotide includes the structure of Formula XXIX (SEQ ID NO: 45), as shown below:

[chemical structure]

wherein [ASO] includes any of the oligonucleotides of the instant invention, wherein m designates a mismatched nucleotide. In some embodiments, the GluR2 ADAR-recruiting domain has the nucleotide sequence of SEQ ID NO. 46, as shown below in the 5′ to 3′ direction:

(SEQ ID NO. 46)
GUGGGUGGAAUAGUAUACCAUUCGUGGUAUAGUAUCCCACCUAC

[0339] In some embodiments, the oligonucleotide includes the structure of Formula XXX (SEQ ID NO: 46), as shown below:

[chemical structure]

wherein [ASO] includes any of the oligonucleotides of the instant invention, wherein m designates a mismatched nucleotide. In some embodiments, the GluR2 ADAR-recruiting domain has the nucleotide sequence of SEQ ID NO. 47, as shown below in the 5′ to 3′ direction:

(SEQ ID NO. 47)
UGGGUGGAAUAGUAUACCAUUCGUGGUAUAGUAUCCCACCUA

[0340] In some embodiments, the oligonucleotide includes the structure of Formula XXXI (SEQ ID NO: 47), as shown below:

[chemical structure]

wherein [ASO] includes any of the oligonucleotides of the instant invention, wherein m designates a mismatched nucleotide. In some embodiments, the GluR2 ADAR-recruiting domain has the nucleotide sequence of SEQ ID NO. 48, as shown below in the 5′ to 3′ direction:

(SEQ ID NO. 48)
GGUGGAAUAGUAUACCAUUCGUGGUAUAGUAUCCCACC

[0341] In some embodiments, the oligonucleotide includes the structure of Formula XXXII (SEQ ID NO: 48), as shown below:

[chemical structure]

wherein [ASO] includes any of the oligonucleotides of the instant invention, wherein m designates a mismatched nucleotide. In some embodiments, the GluR2 ADAR-recruiting domain has the nucleotide sequence of SE ID NO. 49, as shown below in the 5′ to 3′ direction:

(SEQ ID NO. 49)
GUGGAAUAGUAUACCAUUCGUGGUAUAGUAUCCCAC

[0342] In some embodiments, the oligonucleotide includes the structure of Formula XXXIII (SEQ ID NO: 49), as shown below:

[chemical structure]

wherein [ASO] includes any of the oligonucleotides of the instant invention, wherein m designates a mismatched nucleotide.

[0343] In some embodiments, the ADAR-recruiting domains are Z-DNA ADAR-recruiting domains. In some embodiments, the ADAR-recruiting domains are MS2 ADAR-recruiting domains. In some embodiments, an MS2 bacteriophage stem-loop structure may be used as an ADAR-recruiting domain (e.g., and MS2 ADAR-recruiting domain). MS2 stem-loops are known to bind the MS2 bacteriophage coat protein, which when fused to the deaminase domain of ADAR (e.g. an ADAR fusion protein) can be used for target-specific deamination. In some embodiments, the MS2 ADAR-recruiting domain has the nucleotide sequence of SEQ ID NO. 50, as shown below in the 5′ to 3′ direction:

(SEQ ID NO. 50)
ACATGAGGATCACCCATGT

[0344] In some embodiments, an ADAR fusion protein is administered to the cell or to the subject using an expression vector construct including a polynucleotide encoding an ADAR fusion protein. In some embodiments, the ADAR fusion protein includes a deaminase domain of ADAR fused to an MS2 bacteriophage coat protein. In some embodiments, the deaminase domain of ADAR is a deaminase domain of ADAR1. In some embodiments, the deaminase domain of ADAR is a deaminase domain of ADAR2. The ADAR fusion protein may be a fusion protein described in Katrekar et al. Nature Methods, 16(3): 239-42 (2019), the ADAR fusion protein of which is herein incorporated by reference

[0345] The nucleic acids featured in the invention can be synthesized and/or modified by methods well established in the art, such as those described in “Current protocols in nucleic acid chemistry,” Beaucage, S. L. et al. (Edrs.), John Wiley & Sons, Inc., New York, N.Y., USA, which is hereby incorporated herein by reference. Alternative nucleotides and nucleosides include those with modifications including, for example, end modifications, e.g., 5′-end modifications (phosphorylation, conjugation, inverted linkages) or 3′-end modifications (conjugation, DNA nucleotides, inverted linkages, etc.); base modifications, e.g., replacement with stabilizing bases, destabilizing bases, or bases that base pair with an expanded repertoire of partners, removal of bases (abasic nucleotides), or conjugated bases; sugar modifications (e.g., at the 2′-position or 4′-position) or replacement of the sugar; and/or backbone modifications, including modification or replacement of the phosphodiester linkages. The nucleobase may also be an isonucleoside in which the nucleobase is moved from the C1 position of the sugar moiety to a different position (e.g. C2, C3, C4, or C5). Specific examples of oligonucleotide compounds useful in the embodiments described herein include, but are not limited to alternative nucleosides containing modified backbones or no natural internucleoside linkages. Nucleotides and nucleosides having modified backbones include, among others, those that do not have a phosphorus atom in the backbone. For the purposes of this specification, and as sometimes referenced in the art, alternative RNAs that do not have a phosphorus atom in their internucleoside backbone can also be considered to be oligonucleosides. In some embodiments, an oligonucleotide will have a phosphorus atom in its internucleoside backbone.

[0346] Alternative internucleoside linkages include, for example, phosphorothioates, chiral phosphorothioates, phosphorodithioates, phosphotriesters, aminoalkylphosphotriesters, methyl and other alkyl phosphonates including 3′-alkylene phosphonates and chiral phosphonates, phosphinates, phosphoramidates including 3′-amino phosphoramidate and aminoalkylphosphoramidates, thionophosphoramidates, thionoalkylphosphonates, thionoalkylphosphotriesters, and boronophosphates having normal 3′-5′ linkages, 2′-5′-linked analogs of these, and those having inverted polarity wherein the adjacent pairs of nucleoside units are linked 3′-5′ to 5′-3′ or 2′-5′ to 5′-2′. Various salts, mixed salts, and free acid forms are also included.

[0347] Representative U.S. patents that teach the preparation of the above phosphorus-containing linkages include, but are not limited to, U.S. Pat. Nos. 3,687,808; 4,469,863; 4,476,301; 5,023,243; 5,177,195; 5,188,897; 5,264,423; 5,276,019; 5,278,302; 5,286,717; 5,321,131; 5,399,676; 5,405,939; 5,453,496; 5,455,233; 5,466,677; 5,476,925; 5,519,126; 5,536,821; 5,541,316; 5,550,111; 5,563,253; 5,571,799; 5,587,361; 5,625,050; 6,028,188; 6,124,445; 6,160,109; 6,169,170; 6,172,209; 6,239,265; 6,277,603; 6,326,199; 6,346,614; 6,444,423; 6,531,590; 6,534,639; 6,608,035; 6,683,167; 6,858,715; 6,867,294; 6,878,805; 7,015,315; 7,041,816; 7,273,933; 7,321,029; and U.S. Pat. No. RE39464, the entire contents of each of which are hereby incorporated herein by reference.

[0348] Alternative internucleoside linkages that do not include a phosphorus atom therein have backbones that are formed by short chain alkyl or cycloalkyl internucleoside linkages, mixed heteroatoms and alkyl or cycloalkyl internucleoside linkages, or one or more short chain heteroatomic or heterocyclic internucleoside linkages. These include those having morpholino linkages (formed in part from the sugar portion of a nucleoside); siloxane backbones; sulfide, sulfoxide and sulfone backbones; formacetyl and thioformacetyl backbones; methylene formacetyl and thioformacetyl backbones; alkene containing backbones; sulfamate backbones; methyleneimino and methylenehydrazino backbones; sulfonate and sulfonamide backbones; amide backbones; and others having mixed N, O, S, and CH₂ component parts.

[0349] Representative U.S. patents that teach the preparation of the above oligonucleosides include, but are not limited to, U.S. Pat. Nos. 5,034,506; 5,166,315; 5,185,444; 5,214,134; 5,216,141; 5,235,033; 5,64,562; 5,264,564; 5,405,938; 5,434,257; 5,466,677; 5,470,967; 5,489,677; 5,541,307; 5,561,225; 5,596,086; 5,602,240; 5,608,046; 5,610,289; 5,618,704; 5,623,070; 5,663,312; 5,633,360; 5,677,437; and, 5,677,439, the entire contents of each of which are hereby incorporated herein by reference.

[0350] In other embodiments, suitable oligonucleotides include those in which both the sugar and the internucleoside linkage, i.e., the backbone, of the nucleotide units are replaced. The base units are maintained for hybridization with an appropriate nucleic acid target compound. One such oligomeric compound, a mimetic that has been shown to have excellent hybridization properties, is referred to as a peptide nucleic acid (PNA). In PNA compounds, the sugar of a nucleoside is replaced with an amide containing backbone, in particular an aminoethylglycine backbone. The nucleobases are retained and are bound directly or indirectly to aza nitrogen atoms of the amide portion of the backbone. Representative U.S. patents that teach the preparation of PNA compounds include, but are not limited to, U.S. Pat. Nos. 5,539,082; 5,714,331; and 5,719,262, the entire contents of each of which are hereby incorporated herein by reference. Additional PNA compounds suitable for use in the oligonucleotides of the invention are described in, for example, in Nielsen et al., Science, 1991, 254, 1497-1500.

[0351] Some embodiments featured in the invention include oligonucleotides with phosphorothioate backbones and oligonucleotides with heteroatom backbones, and in particular —CH₂—NH—CH₂—, —CH₂—N(CH₃)—O—CH₂— [known as a methylene (methylimino) or MMI backbone], —CH₂—O—N(CH₃)—CH₂—, —CH₂—N(CH₃)—N(CH₃)—CH₂— and —N(CH₃)—CH₂—CH₂-[wherein the native phosphodiester backbone is represented as —O—P—O—CH₂-] of the above-referenced U.S. Pat. No. 5,489,677, and the amide backbones of the above-referenced U.S. Pat. No. 5,602,240. In some embodiments, the oligonucleotides featured herein have morpholino backbone structures of the above-referenced U.S. Pat. No. 5,034,506. In other embodiments, the oligonucleotides described herein include phosphorodiamidate morpholino oligomers (PMO), in which the deoxyribose moiety is replaced by a morpholine ring, and the charged phosphodiester inter-subunit linkage is replaced by an uncharged phophorodiamidate linkage, as described in Summerton, et al., Antisense Nucleic Acid Drug Dev. 1997, 7:63-70.

[0352] Alternative nucleosides and nucleotides can also contain one or more substituted sugar moieties. The oligonucleotides, e.g., oligonucleotides, featured herein can include one of the following at the 2′-position: OH; F; O-, S-, or N-alkyl; O-, S-, or N-alkenyl; O-, S- or N-alkynyl; or O-alkyl-O-alkyl, wherein the alkyl, alkenyl and alkynyl can be substituted or unsubstituted C₁ to C₁₀ alkyl or C₂ to C₁₀ alkenyl and alkynyl. Exemplary suitable modifications include —O[(CH₂)ₙO]ₘCH₃, —O(CH₂)ₙOCH₃, —O(CH₂)ₙ—NH₂, —O(CH₂)ₙCH₃, —O(CH₂)ₙ—ONH₂, and —O(CH₂)ₙ—ON[(CH₂)·CH₃]₂, where n and m are from 1 to about 10. In other embodiments, oligonucleotides include one of the following at the 2′ position: C₁ to C₁₀ lower alkyl, substituted lower alkyl, alkaryl, aralkyl, O-alkaryl or O-aralkyl, SH, SCH₃, OCN, Cl, Br, CN, CF₃, OCF₃, SOCH₃, SO₂CH₃, ONO₂, NO₂, N₃, NH₂, heterocycloalkyl, heterocycloalkaryl, aminoalkylamino, polyalkylamino, substituted silyl, an RNA cleaving group, a reporter group, an intercalator, a group for improving the pharmacokinetic properties of an oligonucleotide, or a group for improving the pharmacodynamic properties of an oligonucleotide, and other substituents having similar properties. In some embodiments, the modification includes a 2′-methoxyethoxy (2′-O—CH₂CH₂OCH₃, also known as 2′-O-(2-methoxyethyl) or 2′-O-MOE) (Martin et al., Helv. Chin. Acta, 1995, 78:486-504) i.e., an alkoxy-alkoxy group. 2′-O-MOE nucleosides confer several beneficial properties to oligonucleotides including, but not limited to, increased nuclease resistance, improved pharmacokinetics properties, reduced non-specific protein binding, reduced toxicity, reduced immunostimulatory properties, and enhanced target affinity as compared to unmodified oligonucleotides.

[0353] Another exemplary alternative contains 2′-dimethylaminooxyethoxy, i.e., a —O(CH₂)₂ON(CH₃)₂ group, also known as 2′-DMAOE, as described in examples herein below, and 2′-dimethylaminoethoxyethoxy (also known in the art as 2′-O-dimethylaminoethoxyethyl or 2′-DMAEOE), i.e., 2′-O—(CH₂)₂—O—(CH₂)₂—N(CH₃)₂. Further exemplary alternatives include: 5′-Me-2′-F nucleotides, 5′-Me-2′-OMe nucleotides, 5′-Me-2′-deoxynucleotides, (both R and S isomers in these three families); 2′-alkoxyalkyl; and 2′-NMA (N-methylacetamide).

[0354] Other alternatives include 2′-methoxy (2′-OCH₃), 2′-aminopropoxy (2′-OCH₂CH₂CH₂NH₂) and 2′-fluoro (2′-F). Similar modifications can also be made at other positions on the nucleosides and nucleotides of an oligonucleotide, particularly the 3′ position of the sugar on the 3′ terminal nucleotide or in 2′-5′ linked oligonucleotides and the 5′ position of 5′ terminal nucleotide. Oligonucleotides can also have sugar mimetics such as cyclobutyl moieties in place of the pentofuranosyl sugar. Representative U.S. patents that teach the preparation of such modified sugar structures include, but are not limited to, U.S. Pat. Nos. 4,981,957; 5,118,800; 5,319,080; 5,359,044; 5,393,878; 5,446,137; 5,466,786; 5,514,785; 5,519,134; 5,567,811; 5,576,427; 5,591,722; 5,597,909; 5,610,300; 5,627,053; 5,639,873; 5,646,265; 5,658,873; 5,670,633; and 5,700,920. The entire contents of each of the foregoing are hereby incorporated herein by reference.

[0355] An oligonucleotide for use in the methods of the present invention can also include nucleobase (often referred to in the art simply as “base”) alternatives (e.g., modifications or substitutions). Unmodified or natural nucleobases include the purine bases adenine (A) and guanine (G), and the pyrimidine bases thymine (T), cytosine (C) and uracil (U). Alternative nucleobases include other synthetic and natural nucleobases such as 5-methylcytosine, 5-hydroxymethylcytosine, 5-formylcytosine, 5-carboxycytosine, pyrrolocytosine, dideoxycytosine, uracil, 5-methoxyuracil, 5-hydroxydeoxyuracil, dihydrouracil, 4-thiouracil, pseudouracil, 1-methyl-pseudouracil, deoxyuracil, 5-hydroxybutynl-2′-deoxyuracil, xanthine, hypoxanthine, 7-deaza-xanthine, thienoguanine, 8-aza-7-deazaguanine, 7-methylguanine, 7-deazaguanine, 6-aminomethyl-7-deazaguanine, 8-aminoguanine, 2,2,7-trimethylguanine, 8-methyladenine, 8-azidoadenine, 7-methyladenine, 7-deazaadenine, 3-deazaadenine, 2,6-diaminopurine, 2-aminopurine, 7-deaza-8-aza-adenine, 8-amino-adenine, thymine, dideoxythymine, 5-nitroindole, 2-aminoadenine, 6-methyl and other alkyl derivatives of adenine and guanine, 2-propyl and other alkyl derivatives of adenine and guanine, 2-thiouracil, 2-thiothymine and 2-thiocytosine, 5-halouracil and cytosine, 5-propynyl uracil and cytosine, 6-azo uracil, cytosine and thymine, 4-thiouracil, 8-halo, 8-amino, 8-thiol, 8-thioalkyl, 8-hydroxyl anal other 8-substituted adenines and guanines, 5-halo, particularly 5-bromo, 5-trifluoromethyl and other 5-substituted uracils and cytosines, 8-azaguanine and 8-azaadenine, and 3-deazaguanine. Further nucleobases include those disclosed in U.S. Pat. No. 3,687,808, those disclosed in Modified Nucleosides in Biochemistry, Biotechnology and Medicine, Herdewijn, P. ed. Wiley-VCH, 2008; those disclosed in The Concise Encyclopedia Of Polymer Science And Engineering, pages 858-859, Kroschwitz, J. L, ed. John Wiley & Sons, 1990, these disclosed by Englisch et al., (1991) Angewandte Chemie, International Edition, 30:613, and those disclosed by Sanghvi, Y S., Chapter 15, Antisense Research and Applications, pages 289-302, Crooke, S. T. and Lebleu, B., Ed., CRC Press, 1993. Certain of these nucleobases are particularly useful for increasing the binding affinity of the oligomeric compounds featured in the invention. These include 5-substituted pyrimidines, 6-azapyrimidines, and N-2, N-6 and 0-6 substituted purines, including 2-aminopropyladenine, 5-propynyluracil, and 5-propynylcytosine. 5-methylcytosine substitutions have been shown to increase nucleic acid duplex stability by 0.6-1.2° C. (Sanghvi, Y. S., Crooke, S. T. and Lebleu, B., Eds., Antisense Research and Applications, CRC Press, Boca Raton, 1993, pp. 276-278) and are exemplary base substitutions, even more particularly when combined with 2′-O-methoxyethyl sugar modifications.

[0356] Representative U.S. patents that teach the preparation of certain of the above noted alternative nucleobases as well as other alternative nucleobases include, but are not limited to, the above noted U.S. Pat. Nos. 3,687,808, 4,845,205; 5,130,30; 5,134,066; 5,175,273; 5,367,066; 5,432,272; 5,457,187; 5,459,255; 5,484,908; 5,502,177; 5,525,711; 5,552,540; 5,587,469; 5,594,121, 5,596,091; 5,614,617; 5,681,941; 5,750,692; 6,015,886; 6,147,200; 6,166,197; 6,222,025; 6,235,887; 6,380,368; 6,528,640; 6,639,062; 6,617,438; 7,045,610; 7,427,672; and 7,495,088, the entire contents of each of which are hereby incorporated herein by reference.

[0357] In other embodiments, the sugar moiety in the nucleotide may be a ribose molecule, optionally having a 2′-O-methyl, 2′-O-MOE, 2′-F, 2′-amino, 2′-O-propyl, 2′-aminopropyl, or 2′-OH modification.

[0358] An oligonucleotide for use in the methods of the present invention can include one or more bicyclic sugar moieties. A “bicyclic sugar” is a furanosyl ring modified by the bridging of two atoms. A “bicyclic nucleoside” (“BNA”) is a nucleoside having a sugar moiety including a bridge connecting two carbon atoms of the sugar ring, thereby forming a bicyclic ring system. In certain embodiments, the bridge connects the 4′-carbon and the 2′-carbon of the sugar ring. Thus, in some embodiments an agent of the invention may include one or more locked nucleosides. A locked nucleoside is a nucleoside having a modified ribose moiety in which the ribose moiety includes an extra bridge connecting the 2′ and 4′ carbons. In other words, a locked nucleoside is a nucleoside including a bicyclic sugar moiety including a 4′-CH₂—O-2′ bridge. This structure effectively “locks” the ribose in the 3′-endo structural conformation. The addition of locked nucleosides to oligonucleotides has been shown to increase oligonucleotide stability in serum, and to reduce off-target effects (Grunweller, A. et al., (2003) Nucleic Acids Research 31(12):3185-3193). Examples of bicyclic nucleosides for use in the polynucleotides of the invention include without limitation nucleosides including a bridge between the 4′ and the 2′ ribosyl ring atoms. In certain embodiments, the polynucleotide agents of the invention include one or more bicyclic nucleosides including a 4′ to 2′ bridge. Examples of such 4′ to 2′ bridged bicyclic nucleosides, include but are not limited to 4′-(CH₂)—O-2′ (LNA); 4′-(CH₂)—S-2′; 4′-(CH₂)₂—O-2′ (ENA); 4′-CH(CH₃)—O-2′ (also referred to as “constrained ethyl” or “cEt”) and 4′-CH(CH₂OCH₃)—O-2′ (and analogs thereof; see, e.g., U.S. Pat. No. 7,399,845); 4′-C(CH₃)(CH₃)—O-2′ (and analogs thereof; see e.g., U.S. Pat. No. 8,278,283); 4′-CH₂—N(OCH₃)-2′ (and analogs thereof; see e.g., U.S. Pat. No. 8,278,425); 4′-CH₂—O—N(CH₃)₂-2′ (see, e.g., U.S. Patent Publication No. 2004/0171570); 4′-CH₂—N(R)—O-2′, wherein R is H, C₁-C₁₂ alkyl, or a protecting group (see, e.g., U.S. Pat. No. 7,427,672); 4′-CH₂—C(H)(CH₃)-2′ (see, e.g., Chattopadhyaya et al., J. Org. Chem., 2009, 74, 118-134); and 4′-CH₂—C(═CH₂)-2′ (and analogs thereof; see, e.g., U.S. Pat. No. 8,278,426). The entire contents of each of the foregoing are hereby incorporated herein by reference.

[0359] Additional representative U.S. patents and US patenttent Publications that teach the preparation of locked nucleic acid nucleotides include, but are not limited to, the following: U.S. Pat. Nos. 6,268,490; 6,525,191; 6,670,461; 6,770,748; 6,794,499; 6,998,484; 7,053,207; 7,034,133; 7,084,125; 7,399,845; 7,427,672; 7,569,686; 7,741,457; 8,022,193; 8,030,467; 8,278,425; 8,278,426; 8,278,283; US 2008/0039618; and US 2009/0012281, the entire contents of each of which are hereby incorporated herein by reference.

[0360] Any of the foregoing bicyclic nucleosides can be prepared having one or more stereochemical sugar configurations including for example α-L-ribofuranose and β-D-ribofuranose (see WO 99/14226).

[0361] An oligonucleotide for use in the methods of the invention can also be modified to include one or more constrained ethyl nucleotides. As used herein, a “constrained ethyl nucleotide” or “cEt” is a locked nucleic acid including a bicyclic sugar moiety including a 4′-CH(CH3)-O-2′ bridge. In one embodiment, a constrained ethyl nucleotide is in the S conformation referred to herein as “S-cEt.”

[0362] An oligonucleotide for use in the methods of the invention may also include one or more “conformationally restricted nucleotides” (“CRN”). CRN are nucleotide analogs with a linker connecting the C2′ and C4′ carbons of ribose or the C3 and —C5′ carbons of ribose. CRN lock the ribose ring into a stable conformation and increase the hybridization affinity to mRNA. The linker is of sufficient length to place the oxygen in an optimal position for stability and affinity resulting in less ribose ring puckering.

[0363] Representative publications that teach the preparation of certain of the above noted CRN include, but are not limited to, US Patent Publication No. 2013/0190383; and PCT publication WO 2013/036868, the entire contents of each of which are hereby incorporated herein by reference.

[0364] In some embodiments, an oligonucleotide for use in the methods of the invention includes one or more monomers that are UNA (unlocked nucleic acid) nucleotides. UNA is unlocked acyclic nucleic acid, wherein any of the bonds of the sugar has been removed, forming an unlocked “sugar” residue. In one example, UNA also encompasses monomer with bonds between C1′-C4′ have been removed (i.e. the covalent carbon-oxygen-carbon bond between the C1′ and C4′ carbons). In another example, the C2′-C3′ bond (i.e. the covalent carbon-carbon bond between the C2′ and C3′ carbons) of the sugar has been removed (see Nuc. Acids Symp. Series, 52, 133-134 (2008) and Fluiter et al., Mol. Biosyst., 2009, 10, 1039 hereby incorporated by reference).

[0365] Representative U.S. publications that teach the preparation of UNA include, but are not limited to, U.S. Pat. No. 8,314,227; and US Patent Publication Nos. 2013/0096289; 2013/0011922; and 2011/0313020, the entire contents of each of which are hereby incorporated herein by reference.

[0366] The ribose molecule may also be modified with a cyclopropane ring to produce a tricyclodeoxynucleic acid (tricyclo DNA). The ribose moiety may be substituted for another sugar such as 1,5,-anhydrohexitol, threose to produce a threose nucleoside (TNA), or arabinose to produce an arabino nucleoside. The ribose molecule can also be replaced with non-sugars such as cyclohexene to produce cyclohexene nucleoside or glycol to produce glycol nucleosides.

[0367] The ribose molecule can also be replaced with non-sugars such as cyclohexene to produce cyclohexene nucleic acid (CeNA) or glycol to produce glycol nucleic acids (GNA). Potentially stabilizing modifications to the ends of nucleotide molecules can include N-(acetylaminocaproyl)-4-hydroxyprolinol (Hyp-C6-NHAc), N-(caproyl-4-hydroxyprolinol (Hyp-C6), N-(acetyl-4-hydroxyprolinol (Hyp-NHAc), thymidine-2′-O-deoxythymidine (ether), N-(aminocaproyl)-4-hydroxyprolinol (Hyp-C6-amino), 2-docosanoyl-uridine-3″-phosphate, inverted base dT(idT) and others. Disclosure of this modification can be found in PCT Publication No. WO 2011/005861.

[0368] Other alternatives chemistries of an oligonucleotide of the invention include a 5′ phosphate or 5′ phosphate mimic, e.g., a 5′-terminal phosphate or phosphate mimic of an oligonucleotide. Suitable phosphate mimics are disclosed in, for example US Patent Publication No. 2012/0157511, the entire contents of which are incorporated herein by reference.

[0369] Exemplary oligonucleotides for use in the methods of the invention include sugar-modified nucleosides and may also include DNA or RNA nucleosides. In some embodiments, the oligonucleotide includes sugar-modified nucleosides and DNA nucleosides. Incorporation of alternative nucleosides into the oligonucleotide of the invention may enhance the affinity of the oligonucleotide for the target nucleic acid. In that case, the alternative nucleosides can be referred to as affinity enhancing alternative nucleotides.

[0370] In some embodiments, the oligonucleotide includes at least 1 alternative nucleoside, such as at least 2, at least 3, at least 4, at least 5, at least 6, at least 7, at least 8, at least 9, at least 10, at least 11, at least 12, at least 13, at least 14, at least 15 or at least 16 alternative nucleosides. In other embodiments, the oligonucleotides include from 1 to 10 alternative nucleosides, such as from 2 to 9 alternative nucleosides, such as from 3 to 8 alternative nucleosides, such as from 4 to 7 alternative nucleosides, such as 6 or 7 alternative nucleosides. In an embodiment, the oligonucleotide of the invention may include alternatives, which are independently selected from these three types of alternative (alternative sugar moiety, alternative nucleobase, and alternative internucleoside linkage), or a combination thereof. Preferably the oligonucleotide includes one or more nucleosides including alternative sugar moieties, e.g., 2′ sugar alternative nucleosides. In some embodiments, the oligonucleotide of the invention include the one or more 2′ sugar alternative nucleoside independently selected from the group consisting of 2′-O-alkyl-RNA, 2′-O-methyl-RNA, 2′-alkoxy-RNA, 2′-O-methoxyethyl-RNA, 2′-amino-DNA, 2′-fluoro-DNA, ANA, 2′-fluoro-ANA, and BNA (e.g., LNA) nucleosides. In some embodiments, the one or more alternative nucleoside is a BNA.

[0371] In some embodiments, at least 1 of the alternative nucleosides is a BNA (e.g., an LNA), such as at least 2, such as at least 3, at least 4, at least 5, at least 6, at least 7, or at least 8 of the alternative nucleosides are BNAs. In a still further embodiment, all the alternative nucleosides are BNAs.

[0372] In a further embodiment the oligonucleotide includes at least one alternative internucleoside linkage. In some embodiments, the internucleoside linkages within the contiguous nucleotide sequence are phosphorothioate or boronophosphate internucleoside linkages. In some embodiments, all the internucleotide linkages in the contiguous sequence of the oligonucleotide are phosphorothioate linkages. In some embodiments the phosphorothioate linkages are stereochemically pure phosphorothioate linkages. In some embodiments, the phosphorothioate linkages are Sp phosphorothioate linkages. In other embodiments, the phosphorothioate linkages are Rp phosphorothioate linkages.

[0373] In some embodiments, the oligonucleotide for use in the methods of the invention includes at least one alternative nucleoside which is a 2′-O-MOE-RNA, such as 2, 3, 4, 5, 6, 7, 8, 9, or 10 2′-O-MOE-RNA nucleoside units. In some embodiments, the 2′-O-MOE-RNA nucleoside units are connected by phosphorothioate linkages. In some embodiments, at least one of said alternative nucleoside is 2′-fluoro DNA, such as 2, 3, 4, 5, 6, 7, 8, 9, or 10 2′-fluoro-DNA nucleoside units. In some embodiments, the oligonucleotide of the invention includes at least one BNA unit and at least one 2′ substituted alternative nucleoside. In some embodiments of the invention, the oligonucleotide includes both 2′ sugar modified nucleosides and DNA units.

[0374] B. Oligonucleotide Conjugated to Ligands

[0375] Oligonucleotides for use in the methods of the invention may be chemically linked to one or more ligands, moieties, or conjugates that enhance the activity, cellular distribution, or cellular uptake of the oligonucleotide. Such moieties include but are not limited to lipid moieties such as a cholesterol moiety (Letsinger et al., (1989) Proc. Natl. Acid. Sci. USA, 86: 6553-6556), cholic acid (Manoharan et al., (1994) Biorg. Med. Chem. Let., 4:1053-1060), a thioether, e.g., beryl-S-tritylthiol (Manoharan et al., (1992) Ann. N.Y. Acad. Sci., 660:306-309; Manoharan et al., (1993) Biorg. Med. Chem. Let., 3:2765-2770), a thiocholesterol (Oberhauser et al., (1992) Nucl. Acids Res., 20:533-538), an aliphatic chain, e.g., dodecandiol or undecyl residues (Saison-Behmoaras et al., (1991) EMBO J, 10:1111-1118; Kabanov et al., (1990) FEBS Lett., 259:327-330; Svinarchuk et al., (1993) Biochimie, 75:49-54), a phospholipid, e.g., di-hexadecyl-rac-glycerol or triethyl-ammonium 1,2-di-O-hexadecyl-rac-glycero-3-phosphonate (Manoharan et al., (1995) Tetrahedron Lett., 36:3651-3654; Shea et al., (1990) Nucl. Acids Res., 18:3777-3783), a polyamine or a polyethylene glycol chain (Manoharan et al., (1995) Nucleosides & Nucleotides, 14:969-973), or adamantane acetic acid (Manoharan et al., (1995) Tetrahedron Lett., 36:3651-3654), a palmityl moiety (Mishra et al., (1995) Biochim. Biophys. Acta, 1264:229-237), or an octadecylamine or hexylamino-carbonyloxycholesterol moiety (Crooke et al., (1996) J. Pharmacol. Exp. Ther., 277:923-937).

[0376] In one embodiment, a ligand alters the distribution, targeting, or lifetime of an oligonucleotide agent into which it is incorporated. In some embodiments, a ligand provides an enhanced affinity for a selected target, e.g., molecule, cell or cell type, compartment, e.g., a cellular or organ compartment, tissue, organ, or region of the body, as, e.g., compared to a species absent such a ligand.

[0377] Ligands can include a naturally occurring substance, such as a protein (e.g., human serum albumin (HSA), low-density lipoprotein (LDL), or globulin); carbohydrate (e.g., a dextran, pullulan, chitin, chitosan, inulin, cyclodextrin, N-acetylglucosamine, N-acetylgalactosamine, or hyaluronic acid); or a lipid. The ligand can also be a recombinant or synthetic molecule, such as a synthetic polymer, e.g., a synthetic polyamino acid. Examples of polyamino acids include polyamino acid is a polylysine (PLL), poly L-aspartic acid, poly L-glutamic acid, styrene-maleic acid anhydride copolymer, poly(L-lactide-co-glycolied) copolymer, divinyl ether-maleic anhydride copolymer, N-(2-hydroxypropyl)methacrylamide copolymer (HMPA), polyethylene glycol (PEG), polyvinyl alcohol (PVA), polyurethane, poly(2-ethylacryllic acid), N-isopropylacrylamide polymers, or polyphosphazine. Example of polyamines include: polyethylenimine, polylysine (PLL), spermine, spermidine, polyamine, pseudopeptide-polyamine, peptidomimetic polyamine, dendrimer polyamine, arginine, amidine, protamine, cationic ionizable lipid, cationic porphyrin, quaternary salt of a polyamine, or an alpha helical peptide.

[0378] Ligands can also include targeting groups, e.g., a cell or tissue targeting agent, e.g., a lectin, glycoprotein, lipid or protein, e.g., an antibody, that binds to a specified cell type such as a kidney cell. A targeting group can be a thyrotropin, melanotropin, lectin, glycoprotein, surfactant protein A, Mucin carbohydrate, multivalent lactose, multivalent galactose, N-acetyl-galactosamine, N-acetyl-gulucosamine multivalent mannose, multivalent fucose, glycosylated polyaminoacids, multivalent galactose, transferrin, bisphosphonate, polyglutamate, polyaspartate, a lipid, cholesterol, a steroid, bile acid, folate, vitamin B12, vitamin A, biotin, or an RGD peptide or RGD peptide mimetic.

[0379] Other examples of ligands include dyes, intercalating agents (e.g. acridines), cross-linkers (e.g. psoralen, mitomycin C), porphyrins (TPPC4, texaphyrin, Sapphyrin), polycyclic aromatic hydrocarbons (e.g., phenazine, dihydrophenazine), artificial endonucleases (e.g. EDTA), lipophilic molecules, e.g., cholesterol, cholic acid, adamantane acetic acid, 1-pyrene butyric acid, dihydrotestosterone, 1,3-Bis-O(hexadecyl)glycerol, geranyloxyhexyl group, hexadecylglycerol, borneol, menthol, 1,3-propanediol, heptadecyl group, palmitic acid, myristic acid, O3-(oleoyl)lithocholic acid, O3-(oleoyl)cholenic acid, dimethoxytrityl, or phenoxazine) and peptide conjugates (e.g., antennapedia peptide, Tat peptide), alkylating agents, phosphate, amino, mercapto, PEG (e.g., PEG-40K), MPEG, [MPEG]₂, polyamino, alkyl, substituted alkyl, radiolabeled markers, enzymes, haptens (e.g. biotin), transport/absorption facilitators (e.g., aspirin, vitamin E, folic acid), synthetic ribonucleases (e.g., imidazole, bisimidazole, histamine, imidazole clusters, acridine-imidazole conjugates, Eu3+ complexes of tetraazamacrocycles), dinitrophenyl, HRP, or AP.

[0380] Ligands can be proteins, e.g., glycoproteins, or peptides, e.g., molecules having a specific affinity for a co-ligand, or antibodies e.g., an antibody, that binds to a specified cell type such as a hepatic cell. Ligands can also include hormones and hormone receptors. They can also include non-peptidic species, such as lipids, lectins, carbohydrates, vitamins, cofactors, multivalent lactose, multivalent galactose, N-acetyl-galactosamine, N-acetyl-gulucosamine multivalent mannose, or multivalent fucose.

[0381] The ligand can be a substance, e.g., a drug, which can increase the uptake of the oligonucleotide agent into the cell, for example, by disrupting the cell's cytoskeleton, e.g., by disrupting the cell's microtubules, microfilaments, and/or intermediate filaments. The drug can be, for example, taxon, vincristine, vinblastine, cytochalasin, nocodazole, japlakinolide, latrunculin A, phalloidin, swinholide A, indanocine, or myoservin.

[0382] In some embodiments, a ligand attached to an oligonucleotide as described herein acts as a pharmacokinetic modulator (PK modulator). PK modulators include lipophiles, bile acids, steroids, phospholipid analogues, peptides, protein binding agents, PEG, vitamins etc. Exemplary PK modulators include, but are not limited to, cholesterol, fatty acids, cholic acid, lithocholic acid, dialkylglycerides, diacylglyceride, phospholipids, sphingolipids, naproxen, ibuprofen, vitamin E, biotin etc. Oligonucleotides that include a number of phosphorothioate linkages are also known to bind to serum protein, thus short oligonucleotides, e.g., oligonucleotides of about 5 bases, 10 bases, 15 bases, or 20 bases, including multiple of phosphorothioate linkages in the backbone are also amenable to the present invention as ligands (e.g. as PK modulating ligands). In addition, aptamers that bind serum components (e.g. serum proteins) are also suitable for use as PK modulating ligands in the embodiments described herein.

[0383] Ligand-conjugated oligonucleotides of the invention may be synthesized by the use of an oligonucleotide that bears a pendant reactive functionality, such as that derived from the attachment of a linking molecule onto the oligonucleotide (described below). This reactive oligonucleotide may be reacted directly with commercially-available ligands, ligands that are synthesized bearing any of a variety of protecting groups, or ligands that have a linking moiety attached thereto.

[0384] The oligonucleotides used in the conjugates of the present invention may be conveniently and routinely made through the well-known technique of solid-phase synthesis. Equipment for such synthesis is sold by several vendors including, for example, Applied Biosystems (Foster City, Calif.). Any other means for such synthesis known in the art may additionally or alternatively be employed. It is also known to use similar techniques to prepare other oligonucleotides, such as the phosphorothioates and alkylated derivatives.

[0385] In the ligand-conjugated oligonucleotides of the present invention, such as the ligand-molecule bearing sequence-specific linked nucleosides of the present invention, the oligonucleotides and oligonucleosides may be assembled on a suitable DNA synthesizer utilizing standard nucleotide or nucleoside precursors, or nucleotide or nucleoside conjugate precursors that already bear the linking moiety, ligand-nucleotide or nucleoside-conjugate precursors that already bear the ligand molecule, or non-nucleoside ligand-bearing building blocks.

[0386] When using nucleotide-conjugate precursors that already bear a linking moiety, the synthesis of the sequence-specific linked nucleosides is typically completed, and the ligand molecule is then reacted with the linking moiety to form the ligand-conjugated oligonucleotide. In some embodiments, the oligonucleotides or linked nucleosides of the present invention are synthesized by an automated synthesizer using phosphoramidites derived from ligand-nucleoside conjugates in addition to the standard phosphoramidites and non-standard phosphoramidites that are commercially available and routinely used in oligonucleotide synthesis.

[0387] i. Lipid Conjugates

[0388] In one embodiment, the ligand or conjugate is a lipid or lipid-based molecule. Such a lipid or lipid-based molecule preferably binds a serum protein, e.g., human serum albumin (HSA). An HSA binding ligand allows for distribution of the conjugate to a target tissue, e.g., a non-kidney target tissue of the body. For example, the target tissue can be the liver, including parenchymal cells of the liver. Other molecules that can bind HSA can also be used as ligands. For example, neproxin or aspirin can be used. A lipid or lipid-based ligand can (a) increase resistance to degradation of the conjugate, (b) increase targeting or transport into a target cell or cell membrane, and/or (c) can be used to adjust binding to a serum protein, e.g., HSA.

[0389] A lipid-based ligand can be used to inhibit, e.g., control the binding of the conjugate to a target tissue. For example, a lipid or lipid-based ligand that binds to HSA more strongly will be less likely to be targeted to the kidney and therefore less likely to be cleared from the body. A lipid or lipid-based ligand that binds to HSA less strongly can be used to target the conjugate to the kidney.

[0390] In another aspect, the ligand is a moiety, e.g., a vitamin, which is taken up by a target cell, e.g., a proliferating cell. Exemplary vitamins include vitamin A, E, and K.

[0391] ii. Cell Permeation Agents

[0392] In another aspect, the ligand is a cell-permeation agent, preferably a helical cell-permeation agent. Preferably, the agent is amphipathic. An exemplary agent is a peptide such as tat or antennopedia. If the agent is a peptide, it can be modified, including a peptidylmimetic, invertomers, non-peptide or pseudo-peptide linkages, and use of D-amino acids. The helical agent is preferably an alpha-helical agent, which preferably has a lipophilic and a lipophobic phase.

[0393] The ligand can be a peptide or peptidomimetic. A peptidomimetic (also referred to herein as an oligopeptidomimetic) is a molecule capable of folding into a defined three-dimensional structure similar to a natural peptide. The attachment of peptide and peptidomimetics to oligonucleotide agents can affect pharmacokinetic distribution of the oligonucleotide, such as by enhancing cellular recognition and absorption. The peptide or peptidomimetic moiety can be about 5-50 amino acids long, e.g., about 5, 10, 15, 20, 25, 30, 35, 40, 45, or 50 amino acids long.

[0394] A peptide or peptidomimetic can be, for example, a cell permeation peptide, cationic peptide, amphipathic peptide, or hydrophobic peptide (e.g., consisting primarily of Tyr, Trp, or Phe). The peptide moiety can be a dendrimer peptide, constrained peptide or crosslinked peptide. In another alternative, the peptide moiety can include a hydrophobic membrane translocation sequence (MTS). An exemplary hydrophobic MTS-containing peptide is RFGF having the amino acid sequence AAVALLPAVLLALLAP (SEQ ID NO. 51). An RFGF analogue (e.g., amino acid sequence AALLPVLLAAP (SEQ ID NO. 52) containing a hydrophobic MTS can also be a targeting moiety. The peptide moiety can be a “delivery” peptide, which can carry large polar molecules including peptides, oligonucleotides, and protein across cell membranes. For example, sequences from the HIV Tat protein (GRKKRRQRRRPPQ; SEQ ID NO. 53) and the Drosophila Antennapedia protein (RQIKIWFQNRRMKWKK; SEQ ID NO. 54) have been found to be capable of functioning as delivery peptides. A peptide or peptidomimetic can be encoded by a random sequence of DNA, such as a peptide identified from a phage-display library, or one-bead-one-compound (OBOC) combinatorial library (Lam et al., Nature, 354:82-84, 1991). Examples of a peptide or peptidomimetic tethered to an oligonucleotide agent via an incorporated monomer unit for cell targeting purposes is an arginine-glycine-aspartic acid (RGD)-peptide, or RGD mimic. A peptide moiety can range in length from about 5 amino acids to about 40 amino acids. The peptide moieties can have a structural modification, such as to increase stability or direct conformational properties. Any of the structural modifications described below can be utilized.

[0395] An RGD peptide for use in the compositions and methods of the invention may be linear or cyclic, and may be modified, e.g., glycosylated or methylated, to facilitate targeting to a specific tissue(s). RGD-containing peptides and peptidomimetics may include D-amino acids, as well as synthetic RGD mimics. In addition to RGD, one can use other moieties that target the integrin ligand. Some conjugates of this ligand target PECAM-1 or VEGF.

[0396] A cell permeation peptide is capable of permeating a cell, e.g., a microbial cell, such as a bacterial or fungal cell, or a mammalian cell, such as a human cell. A microbial cell-permeating peptide can be, for example, an α-helical linear peptide (e.g., LL-37 or Ceropin P1), a disulfide bond-containing peptide (e.g., α-defensin, β-defensin, or bactenecin), or a peptide containing only one or two dominating amino acids (e.g., PR-39 or indolicidin). A cell permeation peptide can also include a nuclear localization signal (NLS). For example, a cell permeation peptide can be a bipartite amphipathic peptide, such as MPG, which is derived from the fusion peptide domain of HIV-1 gp41 and the NLS of SV40 large T antigen (Simeoni et al., Nucl. Acids Res. 31:2717-2724, 2003).

[0397] iii. Carbohydrate Conjugates

[0398] In some embodiments of the compositions and methods of the invention, an oligonucleotide further includes a carbohydrate. The carbohydrate conjugated oligonucleotide is advantageous for the in vivo delivery of nucleic acids, as well as compositions suitable for in vivo therapeutic use, as described herein. As used herein, “carbohydrate” refers to a compound which is either a carbohydrate per se made up of one or more monosaccharide units having at least 6 carbon atoms (which can be linear, branched or cyclic) with an oxygen, nitrogen or sulfur atom bonded to each carbon atom; or a compound having as a part thereof a carbohydrate moiety made up of one or more monosaccharide units each having at least six carbon atoms (which can be linear, branched or cyclic), with an oxygen, nitrogen or sulfur atom bonded to each carbon atom. Representative carbohydrates include the sugars (mono-, di-, tri- and oligosaccharides containing from about 4, 5, 6, 7, 8, or 9 monosaccharide units), and polysaccharides such as starches, glycogen, cellulose and polysaccharide gums. Specific monosaccharides include C5 and above (e.g., C5, C6, C7, or C8) sugars; di- and trisaccharides include sugars having two or three monosaccharide units (e.g., C5, C6, C7, or C8).

[0399] In one embodiment, a carbohydrate conjugate for use in the compositions and methods of the invention is a monosaccharide.

[0400] In some embodiments, the carbohydrate conjugate further includes one or more additional ligands as described above, such as, but not limited to, a PK modulator and/or a cell permeation peptide.

[0401] Additional carbohydrate conjugates (and linkers) suitable for use in the present invention include those described in PCT Publication Nos. WO 2014/179620 and WO 2014/179627, the entire contents of each of which are incorporated herein by reference.

[0402] iv. Linkers

[0403] In some embodiments, the conjugate or ligand described herein can be attached to an oligonucleotide with various linkers that can be cleavable or non-cleavable.

[0404] Linkers typically include a direct bond or an atom such as oxygen or sulfur, a unit such as NR⁸, C(O), C(O)NH, SO, SO₂, SO₂NH or a chain of atoms, such as, but not limited to, substituted or unsubstituted alkyl, substituted or unsubstituted alkenyl, substituted or unsubstituted alkynyl, arylalkyl, arylalkenyl, arylalkynyl, heteroarylalkyl, heteroarylalkenyl, heteroarylalkynyl, heterocyclylalkyl, heterocyclylalkenyl, heterocyclylalkynyl, aryl, heteroaryl, heterocyclyl, cycloalkyl, cycloalkenyl, alkylarylalkyl, alkylarylalkenyl, alkylarylalkynyl, alkenylarylalkyl, alkenylarylalkenyl, alkenylarylalkynyl, alkynylarylalkyl, alkynylarylalkenyl, alkynylarylalkynyl, alkylheteroarylalkyl, alkylheteroarylalkenyl, alkylheteroarylalkynyl, alkenylheteroarylalkyl, alkenylheteroarylalkenyl, alkenylheteroarylalkynyl, alkynylheteroarylalkyl, alkynylheteroarylalkenyl, alkynylheteroarylalkynyl, alkylheterocyclylalkyl, alkylheterocyclylalkenyl, alkylhererocyclylalkynyl, alkenylheterocyclylalkyl, alkenylheterocyclylalkenyl, alkenylheterocyclylalkynyl, alkynylheterocyclylalkyl, alkynylheterocyclylalkenyl, alkynylheterocyclylalkynyl, alkylaryl, alkenylaryl, alkynylaryl, alkylheteroaryl, alkenylheteroaryl, alkynylhereroaryl, which one or more methylenes can be interrupted or terminated by O, S, S(O), SO₂, N(R⁸), C(O), substituted or unsubstituted aryl, substituted or unsubstituted heteroaryl, substituted or unsubstituted heterocyclic; where R⁸ is hydrogen, acyl, aliphatic or substituted aliphatic. In one embodiment, the linker is between about 1-24 atoms, 2-24, 3-24, 4-24, 5-24, 6-24, 6-18, 7-18, 8-18 atoms, 7-17, 8-17, 6-16, 7-17, or 8-16 atoms.

[0405] A cleavable linking group is one which is sufficiently stable outside the cell, but which upon entry into a target cell is cleaved to release the two parts the linker is holding together. In a preferred embodiment, the cleavable linking group is cleaved at least about 10 times, 20, times, times, 40 times, 50 times, 60 times, 70 times, 80 times, 90 times, or more, or at least about 100 times faster in a target cell or under a first reference condition (which can, e.g., be selected to mimic or represent intracellular conditions) than in the blood of a subject, or under a second reference condition (which can, e.g., be selected to mimic or represent conditions found in the blood or serum).

[0406] Cleavable linking groups are susceptible to cleavage agents, e.g., pH, redox potential, or the presence of degradative molecules. Generally, cleavage agents are more prevalent or found at higher levels or activities inside cells than in serum or blood. Examples of such degradative agents include: redox agents which are selective for particular substrates or which have no substrate specificity, including, e.g., oxidative or reductive enzymes or reductive agents such as mercaptans, present in cells, that can degrade a redox cleavable linking group by reduction; esterases; endosomes or agents that can create an acidic environment, e.g., those that result in a pH of five or lower; enzymes that can hydrolyze or degrade an acid cleavable linking group by acting as a general acid, peptidases (which can be substrate specific), and phosphatases.

[0407] A cleavable linkage group, such as a disulfide bond can be susceptible to pH. The pH of human serum is 7.4, while the average intracellular pH is slightly lower, ranging from about 7.1-7.3. Endosomes have a more acidic pH, in the range of 5.5-6.0, and lysosomes have an even more acidic pH at around 5.0. Some linkers will have a cleavable linking group that is cleaved at a preferred pH, thereby releasing a cationic lipid from the ligand inside the cell, or into the desired compartment of the cell.

[0408] A linker can include a cleavable linking group that is cleavable by a particular enzyme. The type of cleavable linking group incorporated into a linker can depend on the cell to be targeted. For example, a liver-targeting ligand can be linked to a cationic lipid through a linker that includes an ester group. Liver cells are rich in esterases, and therefore the linker will be cleaved more efficiently in liver cells than in cell types that are not esterase-rich. Other cell-types rich in esterases include cells of the lung, renal cortex, and testis.

[0409] Linkers that contain peptide bonds can be used when targeting cell types rich in peptidases, such as liver cells and synoviocytes.

[0410] In general, the suitability of a candidate cleavable linking group can be evaluated by testing the ability of a degradative agent (or condition) to cleave the candidate linking group. It will also be desirable to also test the candidate cleavable linking group for the ability to resist cleavage in the blood or when in contact with other non-target tissues. Thus, one can determine the relative susceptibility to cleavage between a first and a second condition, where the first is selected to be indicative of cleavage in a target cell and the second is selected to be indicative of cleavage in other tissues or biological fluids, e.g., blood or serum. The evaluations can be carried out in cell free systems, in cells, in cell culture, in organ or tissue culture, or in whole animals. It can be useful to make initial evaluations in cell-free or culture conditions and to confirm by further evaluations in whole animals. In preferred embodiments, useful candidate compounds are cleaved at least about 2, 4, 10, 20, 30, 40, 50, 60, 70, 80, 90, or about 100 times faster in the cell (or under in vitro conditions selected to mimic intracellular conditions) as compared to blood or serum (or under in vitro conditions selected to mimic extracellular conditions).

[0411] a. Redox Cleavable Linking Groups

[0412] In one embodiment, a cleavable linking group is a redox cleavable linking group that is cleaved upon reduction or oxidation. An example of reductively cleavable linking group is a disulphide linking group (—S—S—). To determine if a candidate cleavable linking group is a suitable “reductively cleavable linking group,” or for example is suitable for use with a particular oligonucleotide moiety and particular targeting agent one can look to methods described herein. For example, a candidate can be evaluated by incubation with dithiothreitol (DTT), or other reducing agent using reagents know in the art, which mimic the rate of cleavage which would be observed in a cell, e.g., a target cell. The candidates can also be evaluated under conditions which are selected to mimic blood or serum conditions. In one embodiment, candidate compounds are cleaved by at most about 10% in the blood. In other embodiments, useful candidate compounds are degraded at least about 2, 4, 10, 20, 30, 40, 50, 60, 70, 80, 90, or about 100 times faster in the cell (or under in vitro conditions selected to mimic intracellular conditions) as compared to blood (or under in vitro conditions selected to mimic extracellular conditions). The rate of cleavage of candidate compounds can be determined using standard enzyme kinetics assays under conditions chosen to mimic intracellular media and compared to conditions chosen to mimic extracellular media.

[0413] b. Phosphate-Based Cleavable Linking Groups

[0414] In another embodiment, a cleavable linker includes a phosphate-based cleavable linking group. A phosphate-based cleavable linking group is cleaved by agents that degrade or hydrolyze the phosphate group. An example of an agent that cleaves phosphate groups in cells are enzymes such as phosphatases in cells. Examples of phosphate-based linking groups are —O—P(O)(OR^{k})—O—, —O—P(S)(OR^{k})—O—, —O—P(S)(SR^{k})—O—, —S—P(O)(OR^{k})—O—, —O—P(O)(OR^{k})—S—, —S—P(O)(OR^{k})—S—, —O—P(S)(OR^{k})—S—, —S—P(S)(OR^{k})—O—, —O—P(O)(R^{k})—O—, —O—P(S)(R^{k})—O—, —S—P(O)(R^{k})—O—, —S—P(S)(R^{k})—O—, —S—P(O)(R^{k})—S—, —O—P(S)(R^{k})—S—. These candidates can be evaluated using methods analogous to those described above.

[0415] c. Acid Cleavable Linking Groups

[0416] In another embodiment, a cleavable linker includes an acid cleavable linking group. An acid cleavable linking group is a linking group that is cleaved under acidic conditions. In preferred embodiments acid cleavable linking groups are cleaved in an acidic environment with a pH of about 6.5 or lower (e.g., about 6.0, 5.75, 5.5, 5.25, 5.0, or lower), or by agents such as enzymes that can act as a general acid. In a cell, specific low pH organelles, such as endosomes and lysosomes can provide a cleaving environment for acid cleavable linking groups. Examples of acid cleavable linking groups include but are not limited to hydrazones, esters, and esters of amino acids. Acid cleavable groups can have the general formula —C═NN—, C(O)O, or —OC(O). A preferred embodiment is when the carbon attached to the oxygen of the ester (the alkoxy group) is an aryl group, substituted alkyl group, or tertiary alkyl group such as dimethyl pentyl or t-butyl. These candidates can be evaluated using methods analogous to those described above.

[0417] d. Ester-Based Linking Groups

[0418] In another embodiment, a cleavable linker includes an ester-based cleavable linking group. An ester-based cleavable linking group is cleaved by enzymes such as esterases and amidases in cells. Examples of ester-based cleavable linking groups include but are not limited to esters of alkylene, alkenylene and alkynylene groups. Ester cleavable linking groups have the general formula —C(O)O—, or —OC(O)—. These candidates can be evaluated using methods analogous to those described above.

[0419] e. Peptide-Based Cleaving Groups

[0420] In yet another embodiment, a cleavable linker includes a peptide-based cleavable linking group. A peptide-based cleavable linking group is cleaved by enzymes such as peptidases and proteases in cells. Peptide-based cleavable linking groups are peptide bonds formed between amino acids to yield oligopeptides (e.g., dipeptides, tripeptides etc.) and polypeptides. Peptide-based cleavable groups do not include the amide group (—C(O)NH—). The amide group can be formed between any alkylene, alkenylene, or alkynelene. A peptide bond is a special type of amide bond formed between amino acids to yield peptides and proteins. The peptide-based cleavage group is generally limited to the peptide bond (i.e., the amide bond) formed between amino acids yielding peptides and proteins and does not include the entire amide functional group. Peptide-based cleavable linking groups have the general formula —NHCHRAC(O)NHCHRBC(O)—, where RA and RB are the R groups of the two adjacent amino acids. These candidates can be evaluated using methods analogous to those described above.

[0421] In one embodiment, an oligonucleotide of the invention is conjugated to a carbohydrate through a linker. Linkers include bivalent and trivalent branched linker groups. Exemplary oligonucleotide carbohydrate conjugates with linkers of the compositions and methods of the invention include, but are not limited to, those described in formulas 24-35 of PCT Publication No. WO 2018/195165.

[0422] Representative U.S. patents that teach the preparation of oligonucleotide conjugates include, but are not limited to, U.S. Pat. Nos. 4,828,979; 4,948,882; 5,218,105; 5,525,465; 5,541,313; 5,545,730; 5,552,538; 5,578,717, 5,580,731; 5,591,584; 5,109,124; 5,118,802; 5,138,045; 5,414,077; 5,486,603; 5,512,439; 5,578,718; 5,608,046; 4,587,044; 4,605,735; 4,667,025; 4,762,779; 4,789,737; 4,824,941; 4,835,263; 4,876,335; 4,904,582; 4,958,013; 5,082,830; 5,112,963; 5,214,136; 5,082,830; 5,112,963; 5,214,136; 5,245,022; 5,254,469; 5,258,506; 5,262,536; 5,272,250; 5,292,873; 5,317,098; 5,371,241, 5,391,723; 5,416,203, 5,451,463; 5,510,475; 5,512,667; 5,514,785; 5,565,552; 5,567,810; 5,574,142; 5,585,481; 5,587,371; 5,595,726; 5,597,696; 5,599,923; 5,599,928 and 5,688,941; 6,294,664; 6,320,017; 6,576,752; 6,783,931; 6,900,297; 7,037,646; 8,106,022, the entire contents of each of which are hereby incorporated herein by reference.

[0423] In certain instances, the nucleotides of an oligonucleotide can be modified by a non-ligand group. A number of non-ligand molecules have been conjugated to oligonucleotides in order to enhance the activity, cellular distribution, or cellular uptake of the oligonucleotide, and procedures for performing such conjugations are available in the scientific literature. Such non-ligand moieties have included lipid moieties, such as cholesterol (Kubo, T. et al., Biochem. Biophys. Res. Comm, 2007, 365(1):54-61; Letsinger et al., Proc. Natl. Acad. Sci. USA, 1989, 86:6553), cholic acid (Manoharan et al., Bioorg. Med. Chem. Lett., 1994, 4:1053), a thioether, e.g., hexyl-S-tritylthiol (Manoharan et al., Ann. N.Y. Acad. Sci., 1992, 660:306; Manoharan et al., Bioorg. Med. Chem. Let., 1993, 3:2765), a thiocholesterol (Oberhauser et al., Nucl. Acids Res., 1992, 20:533), an aliphatic chain, e.g., dodecandiol or undecyl residues (Saison-Behmoaras et al., EMBO J., 1991, 10:111; Kabanov et al., FEBS Lett., 1990, 259:327; Svinarchuk et al., Biochimie, 1993, 75:49), a phospholipid, e.g., di-hexadecyl-rac-glycerol or triethylammonium 1,2-di-O-hexadecyl-rac-glycero-3-H-phosphonate (Manoharan et al., Tetrahedron Lett., 1995, 36:3651; Shea et al., Nucl. Acids Res., 1990, 18:3777), a polyamine or a polyethylene glycol chain (Manoharan et al., Nucleosides & Nucleotides, 1995, 14:969), or adamantane acetic acid (Manoharan et al., Tetrahedron Lett., 1995, 36:3651), a palmityl moiety (Mishra et al., Biochim. Biophys. Acta, 1995, 1264:229), or an octadecylamine or hexylamino-carbonyl-oxycholesterol moiety (Crooke et al., J. Pharmacol. Exp. Ther., 1996, 277:923). Representative United States patents that teach the preparation of such oligonucleotide conjugates have been listed above. Typical conjugation protocols involve the synthesis of an oligonucleotide bearing an amino linker at one or more positions of the sequence. The amino group is then reacted with the molecule being conjugated using appropriate coupling or activating reagents. The conjugation reaction can be performed either with the oligonucleotide still bound to the solid support or following cleavage of the oligonucleotide, in solution phase. Purification of the oligonucleotide conjugate by HPLC typically affords the pure conjugate.

### IV. Pharmaceutical Compositions

[0424] The present disclosure also includes pharmaceutical compositions and formulations which include the oligonucleotides of the disclosure. In one embodiment, provided herein are pharmaceutical compositions containing an oligonucleotide, e.g., a guide oligonucleotide, as described herein, and a pharmaceutically acceptable carrier. The pharmaceutical compositions containing the oligonucleotide are useful for treating a subject who would benefit from editing a target gene, e.g., a MECP2 polynucleotide with a SNP associated with Rett syndrome.

[0425] The pharmaceutical compositions of the present disclosure can be administered in a number of ways depending upon whether local or systemic treatment is desired and upon the area to be treated. Administration can be oral, parental, topical (e.g., by a transdermal patch), intranasal, intratracheal, epidermal and transdermal.

[0426] Parenteral administration includes intravenous, intraarterial, subcutaneous, intraperitoneal or intramuscular injection or infusion; subdermal, e.g., via an implanted device; or intracranial, e.g., by intraparenchymal, intrathecal or intraventricular, administration. Parenteral administration may be by continuous infusion over a selected period of time.

[0427] Pharmaceutical compositions and formulations for topical administration can include transdermal patches, ointments, lotions, creams, gels, drops, suppositories, sprays, liquids and powders. Conventional pharmaceutical carriers, aqueous, powder or oily bases, thickeners and the like can be necessary or desirable. Coated condoms, gloves and the like can also be useful. Suitable topical formulations include those in which the oligonucleotides featured in the disclosure are in admixture with a topical delivery agent such as lipids, liposomes, fatty acids, fatty acid esters, steroids, chelating agents and surfactants. Suitable lipids and liposomes include neutral (e.g., dioleoylphosphatidyl DOPE ethanolamine, dimyristoylphosphatidyl choline DMPC, distearolyphosphatidyl choline) negative (e.g., dimyristoylphosphatidyl glycerol DMPG) and cationic (e.g., dioleoyltetramethylaminopropyl DOTAP and dioleoylphosphatidyl ethanolamine DOTMA). Oligonucleotides featured in the disclosure can be encapsulated within liposomes or can form complexes thereto, in particular to cationic liposomes. Alternatively, Oligonucleotides can be complexed to lipids, in particular to cationic lipids. Suitable fatty acids and esters include but are not limited to arachidonic acid, oleic acid, eicosanoic acid, lauric acid, caprylic acid, capric acid, myristic acid, palmitic acid, stearic acid, linoleic acid, linolenic acid, dicaprate, tricaprate, monoolein, dilaurin, glyceryl 1-monocaprate, 1-dodecylazacycloheptan-2-one, an acylcarnitine, an acylcholine, or a C1-20 alkyl ester (e.g., isopropylmyristate IPM), monoglyceride, diglyceride or pharmaceutically acceptable salt thereof. Topical formulations are described in detail in U.S. Pat. No. 6,747,014, which is incorporated herein by reference.

[0428] Compositions and formulations for parenteral, intraparenchymal (into the brain), intrathecal, intraventricular or intrahepatic administration can include sterile aqueous solutions which can also contain buffers, diluents and other suitable additives such as, but not limited to, penetration enhancers, carrier compounds and other pharmaceutically acceptable carriers or excipients.

[0429] Useful solutions for oral or parenteral administration can be prepared by any of the methods well known in the pharmaceutical art, described, for example; in Remington's Pharmaceutical Sciences, 18th ed. (Mack Publishing Company, 1990). The parenteral preparation can be enclosed in ampoules, disposable syringes or multiple dose vials made of glass or plastic. Formulations also can include, for example, polyalkylene glycols such as polyethylene glycol, oils of vegetable origin, and hydrogenated naphthalenes. Other potentially useful parenteral carriers for these drugs include ethylene-vinyl acetate copolymer particles, osmotic pumps, implantable infusion systems, and liposomes.

[0430] Formulations of the present disclosure suitable for oral administration may be in the form of: discrete units such as capsules, gelatin capsules, sachets, tablets, troches, or lozenges, each containing a predetermined amount of the drug; a powder or granular composition; a solution or a suspension in an aqueous liquid or non-aqueous liquid; or an oil-in-water emulsion or a water-in-oil emulsion. The drug may also be administered in the form of a bolus, electuary or paste. A tablet may be made by compressing or molding the drug optionally with one or more accessory ingredients. Compressed tablets may be prepared by compressing, in a suitable machine, the drug in a free-flowing form such as a powder or granules, optionally mixed by a binder, lubricant, inert diluent, surface active or dispersing agent. Molded tablets may be made by molding; in a suitable machine; a mixture of the powdered drug and suitable carrier moistened with an inert liquid diluent.

[0431] Oral compositions generally include an inert diluent or an edible carrier. For the purpose of oral therapeutic administration, the active compound can be incorporated with excipients. Pharmaceutically compatible binding agents, and/or adjuvant materials can be included as part of the composition. The tablets, pills, capsules, troches and the like can contain any of the following ingredients, or compounds of a similar nature: a binder such as microcrystalline cellulose, gum tragacanth or gelatin; an excipient such as starch or lactose; a disintegrating agent such as alginic acid, Primogel, or corn starch; a lubricant such as magnesium stearate or Sterotes; a glidant such as colloidal silicon dioxide; a sweetening agent such as sucrose or saccharin; or a flavoring agent such as peppermint, methyl salicylate, or orange flavoring.

[0432] Pharmaceutical compositions suitable for injectable use include sterile aqueous solutions (where water soluble) or dispersions and sterile powders for the extemporaneous preparation of sterile injectable solutions or dispersion. For intravenous administration, suitable carriers include physiological saline, bacteriostatic water, Cremophor EL™ (BASF, Parsippany, N.J.) or phosphate buffered saline (PBS). It should be stable under the conditions of manufacture and storage and should be preserved against the contaminating action of microorganisms such as bacteria and fungi. The carrier can be a solvent or dispersion medium containing, for example, water; ethanol, polyol (for example, glycerol, propylene glycol, and liquid polyethylene glycol), and suitable mixtures thereof. The proper fluidity can be maintained, for example, by the use of a coating such as lecithin, by the maintenance of the required particle size in the case of dispersion and by the use of surfactants. In many cases, it will be preferable to include isotonic agents, for example, sugars, polyalcohols such as mannitol, sorbitol, and/or sodium chloride in the composition. Prolonged absorption of the injectable compositions can be brought about by including in the composition an agent which delays absorption, for example, aluminum monostearate and gelatin.

[0433] Sterile injectable solutions can be prepared by incorporating the active compound in the required amount in an appropriate solvent with one or a combination of ingredients enumerated above, as required, followed by filter sterilization. Generally, dispersions are prepared by incorporating the active compound into a sterile vehicle which contains a basic dispersion medium and the required other ingredients from those enumerated above. In the case of sterile powders for the preparation of sterile injectable solutions; methods of preparation include vacuum drying and freeze-drying which yields a powder of the active ingredient plus any additional desired ingredient from a previously sterile-filtered solution thereof.

[0434] Formulations suitable for intra-articular administration may be in the form of a sterile aqueous preparation of the drug that may be in microcrystal line form, for example, in the form of an aqueous microcrystalline suspension. Liposomal formulations or biodegradable polymer systems may also be used to present the drug for both intra-articular and ophthalmic administration.

[0435] Systemic administration also can be by transmucosal or transdermal means. For transmucosal or transdermal administration, penetrants appropriate to the barrier to be permeated are used in the formulation. Such penetrants generally are known in the art, and include, for example, for transmucosal administration, detergents and bile salts. Transmucosal administration can be accomplished through the use of nasal sprays or suppositories. For transdermal administration, the active compounds typically are formulated into ointments, salves, gels, or creams as generally known in the art.

[0436] The active compounds may be prepared with carriers that will protect the compound against rapid elimination from the body, such as a controlled release formulation, including implants and microencapsulated delivery systems. Biodegradable, biocompatible polymers can be used; such as ethylene vinyl acetate, polyanhydrides, polyglycolic acid, collagen, polyorthoesters, and polylactic acid. Methods for preparation of such formulations will be apparent to those skilled in the art. Liposomal suspensions can also be used as pharmaceutically acceptable carriers. These can be prepared according to methods known to those skilled in the art, for example, as described in U.S. Pat. No. 4,522,811.

[0437] Oral or parenteral compositions can be formulated in dosage unit form for ease of administration and uniformity of dosage. Dosage unit form refers to physically discrete units suited as unitary dosages for the subject to be treated; each unit containing a predetermined quantity of active compound calculated to produce the desired therapeutic effect in association with the required pharmaceutical carrier. The specification for the dosage unit forms of the disclosure are dictated by and directly dependent on the unique characteristics of the active compound and the particular therapeutic effect to be achieved, and the limitations inherent in the art of compounding such an active compound for the treatment of individuals. Furthermore, administration can be by periodic injections of a bolus, or can be made more continuous by intravenous, intramuscular or intraperitoneal administration from an external reservoir (e.g., an intravenous bag).

[0438] Where the active compound is to be used as part of a transplant procedure, it can be provided to the living tissue or organ to be transplanted prior to removal of tissue or organ from the donor. The compound can be provided to the donor host. Alternatively, or in addition, once removed from the donor, the organ or living tissue can be placed in a preservation solution containing the active compound. In all cases, the active compound can be administered directly to the desired tissue, as by injection to the tissue, or it can be provided systemically, either by oral or parenteral administration, using any of the methods and formulations described herein and/or known in the art. Where the drug comprises part of a tissue or organ preservation solution, any commercially available preservation solution can be used to advantage. For example, useful solutions known in the art include Collins solution, Wisconsin solution, Belzer solution, Eurocollins solution and lactated Ringer's solution.

[0439] The pharmaceutical formulations of the present disclosure, which can conveniently be presented in unit dosage form, can be prepared according to conventional techniques well known in the pharmaceutical industry. Such techniques include the step of bringing into association the active ingredients with the pharmaceutical carrier(s) or excipient(s). In general, the formulations are prepared by uniformly and intimately bringing into association the active ingredients with liquid carriers or finely divided solid carriers or both, and then, if necessary, shaping the product.

[0440] The compositions of the present disclosure can be formulated into any of many possible dosage forms such as, but not limited to, tablets, capsules, gel capsules, liquid syrups, soft gels, suppositories, and enemas. The compositions of the present disclosure can also be formulated as suspensions in aqueous, non-aqueous or mixed media. Aqueous suspensions can further contain substances which increase the viscosity of the suspension including, for example, sodium carboxymethylcellulose, sorbitol or dextran. The suspension can also contain stabilizers.

[0441] The compositions of the present disclosure can also be prepared and formulated in additional formulations, such as emulsions or microemulsions, or be incorporated into a particle, e.g., a microparticle, which can be produced by spray-drying, or other methods including lyophilization, evaporation, fluid bed drying, vacuum drying, or a combination of these techniques. Penetration enhancers, e.g., surfactants, fatty acids, bile salts, chelating agents, and non-chelating non-surfactants, may be added in order to effect the efficient delivery of the compositions of the present disclosure, e.g., the delivery of the oligonucleotides, to the subject. Agents that enhance uptake of oligonucleotide agents at the cellular level can also be added to the pharmaceutical and other compositions of the present disclosure, such as, cationic lipids, e.g., lipofectin, cationic glycerol derivatives, and polycationic molecules, e.g., polylysine.

[0442] The pharmaceutical composition of the present disclosure may also include a pharmaceutical carrier or excipient. A pharmaceutical carrier or excipient is a pharmaceutically acceptable solvent, suspending agent or any other pharmacologically inert vehicle for delivering one or more nucleic acids to an animal. The excipient can be liquid or solid and is selected, with the planned manner of administration in mind, so as to provide for the desired bulk, consistency, etc., when combined with a nucleic acid and the other components of a given pharmaceutical composition. Typical pharmaceutical carriers include, but are not limited to, binding agents (e.g., pregelatinized maize starch, polyvinylpyrrolidone or hydroxypropyl methylcellulose, etc.); fillers (e.g., lactose and other sugars, microcrystalline cellulose, pectin, gelatin, calcium sulfate, ethyl cellulose, polyacrylates or calcium hydrogen phosphate, etc.); lubricants (e.g., magnesium stearate, talc, silica, colloidal silicon dioxide, stearic acid, metallic stearates, hydrogenated vegetable oils, corn starch, polyethylene glycols, sodium benzoate, sodium acetate, etc.); disintegrants (e.g., starch, sodium starch glycolate, etc.); and wetting agents (e.g., sodium lauryl sulphate, etc).

[0443] Formulations for topical administration of nucleic acids can include sterile and non-sterile aqueous solutions, non-aqueous solutions in common solvents such as alcohols, or solutions of the nucleic acids in liquid or solid oil bases. The solutions can also contain buffers, diluents and other suitable additives. Pharmaceutically acceptable organic or inorganic excipients suitable for non-parenteral administration which do not deleteriously react with nucleic acids can be used. Suitable pharmaceutically acceptable excipients include, but are not limited to, water, salt solutions, alcohol, polyethylene glycols, gelatin, lactose, amylose, magnesium stearate, talc, silicic acid, viscous paraffin, hydroxymethylcellulose, polyvinylpyrrolidone and the like.

[0444] Toxicity and therapeutic efficacy of the compositions can be determined by standard pharmaceutical procedures in cell cultures or experimental animals, e.g., for determining the LD₅₀ (the dose lethal to 50% of the population) and the ED₅₀ (the dose therapeutically effective in 50% of the population). Compounds that exhibit high therapeutic indices are preferred. The data obtained from cell culture assays and animal studies can be used in formulating a range of dosage for use in humans.

[0445] The dosage of the compositions (e.g., a composition including an oligonucleotide) described herein, can vary depending on many factors, such as the pharmacodynamic properties of the compound; the mode of administration; the age, health, and weight of the recipient; the nature and extent of the symptoms; the frequency of the treatment, and the type of concurrent treatment, if any; and the clearance rate of the compound in the animal to be treated. One of skill in the art can determine whether to administer the composition and tailor the appropriate dosage and/or therapeutic regimen of treatment with the composition based on the above factors. The compositions described herein may be administered initially in a suitable dosage that may be adjusted as required, depending on the clinical response. In some embodiments, the dosage of a composition (e.g., a composition including an oligonucleotide) is a prophylactically or a therapeutically effective amount. In some embodiments, treatment of a subject with a therapeutically effective amount of a composition can include a single treatment or a series of treatments. In addition, it is to be understood that the initial dosage administered may be increased beyond the above upper level in order to rapidly achieve the desired blood-level or tissue level, or the initial dosage may be smaller than the optimum and the daily dosage may be progressively increased during the course of treatment depending on the particular situation. If desired, the daily dose may also be divided into multiple doses for administration, for example, two to four times per day.

[0446] The pharmaceutical compositions of the disclosure may be administered in dosages sufficient to edit a target gene, e.g., a MECP2 polynucleotide, and/or treat Rett syndrome. In therapeutic use for treating, preventing, or combating, Rett syndrome in subjects, the compounds or pharmaceutical compositions thereof will be administered orally or parenterally at a dosage to obtain and maintain a concentration, that is, an amount, or blood-level or tissue level of active component in the animal undergoing treatment which will be effective. The term “effective amount” is understood to mean that the compound of the disclosure is present in or on the recipient in an amount sufficient to elicit biological activity. Generally, an effective amount of dosage of active component will be in the range of from about 1 μg/kg to about 100 mg/kg, preferably from about 10 μg/kg to about 10 mg/kg, more preferably from about 100 μg/kg to about 1 mg/kg of body weight per day.

### V. Kits

[0447] In certain aspects, the instant disclosure provides kits that include a pharmaceutical formulation including an oligonucleotide agent capable of effecting an adenosine deaminase acting on RNA (ADAR)-mediated adenosine to inosine alteration of a SNP associated with a disease, e.g., Rett syndrome, and a package insert with instructions to perform any of the methods described herein.

[0448] In some embodiments, the kits include instructions for using the kit to edit a MECP2 polynucleotide comprising a SNP associated with Rett syndrome. In other embodiments, the kits include instructions for using the kit to edit a MECP2 polynucleotide comprising a SNP associated with Rett syndrome and to treat Rett syndrome. The instructions will generally include information about the use of the kit for editing nucleic acid molecules. In other embodiments, the instructions include at least one of the following: precautions; warnings; clinical studies; and/or references. The instructions may be printed directly on the container (when present), or as a label applied to the container, or as a separate sheet, pamphlet, card, or folder supplied in or with the container. In a further embodiment, a kit can comprise instructions in the form of a label or separate insert (package insert) for suitable operational parameters.

[0449] In some embodiments, the kit includes a pharmaceutical formulation including an oligonucleotide agent capable of effecting an ADAR-mediated adenosine to inosine alteration of a SNP associated with a disease, e.g., Rett syndrome, an additional therapeutic agent, and a package insert with instructions to perform any of the methods described herein.

[0450] The kit may be packaged in a number of different configurations such as one or more containers in a single box. The different components can be combined, e.g., according to instructions provided with the kit. The components can be combined according to a method described herein, e.g., to prepare and administer a pharmaceutical composition.

[0451] In some embodiments, the kit can comprise one or more containers with appropriate positive and negative controls or control samples, to be used as standard(s) for detection, calibration, or normalization.

[0452] The kit can further comprise a second container comprising a pharmaceutically-acceptable buffer, such as (sterile) phosphate-buffered saline, Ringer's solution, or dextrose solution; and other suitable additives such as penetration enhancers, carrier compounds and other pharmaceutically acceptable carriers or excipients, as described herein. It can further include other materials desirable from a commercial and user standpoint, including other buffers, diluents, filters, and package inserts with instructions for use. The kit can also include a drug delivery system such as liposomes, micelles, nanoparticles, and microspheres, as described herein. The kit can further include a delivery device, e.g., for delivery to the central nervous system, such as needles, syringes, pumps, and package inserts with instructions for use.

[0453] This invention is further illustrated by the following examples which should not be construed as limiting. The entire contents of all references, patents and published patent applications cited throughout this application, as well as the Figures and the Sequence Listing, are hereby incorporated herein by reference.

### EXAMPLES

### Example 1. Reversing an Amino Acid Substitution Mutation R255X in the MECP2 Transcript by Targeted A to I Editing

[0454] Guide oligonucleotides were chemically synthesized on an automated RNA/DNA synthesizer using standard β-cyanoethylphosphoramidite chemistry and a universal solid support such as controlled pore glass (CPG). 5-O-DMT-3-phosphoramidite RNA, 2′-O-methyl-RNA and DNA monomers, i.e., A, C, G, U, and T, were purchased from commercial sources. All oligonucleotides were synthesized by BioSpring GmbH (Frankfurt, Germany) at a 200 nmol scale. After synthesis, oligonucleotides were cleaved from the solid support, deprotected, and purified by a HPLC system using standard protocols. Oligonucleotides were desalted, dialyzed, and lyophilized. The purity of each lyophilized oligo was >90% as determined by analytical reversed-phase HPLC. The sequence integrity of the oligonucleotides was determined by ESI-MS.

[0455] Human ADAR2 sequence (NM_001112.4; SEQ ID NO: 55), human ADAR1p110 (NM_001111.5; SEQ ID NO: 56) and human MECP2 R255X (NM_004992; SEQ ID NO: 58) sequences (ORF only), were cloned into pcDNA3.1 plasmid under the control of the CMV promoter using BamHI and XbaI restriction sites (Quintara Bio, Berkeley, Calif.) and the correct insert was sequence verified. For the human MECP2 R255X construct, recombinant HA-tag is placed in-frame at the N-terminus of the coding sequence. The plasmids will henceforth be denoted as ADAR2/pcDNA3.1, ADAR1p110/pcDNA3.1, or MECP2/pcDNA3.1. For editing experiments, 2 μg of ADAR2/pcDNA3.1 or ADAR1p110/pcDNA3.1 plasmid and 10 μg of MECP2/pcDNA3.1 plasmid were transfected into 5×10⁶ HEK293T cells (ATCC) using 25 μL of Lipofectamine 3000 and 24 μL of P3000 (Life Technologies) per 10 cm dish. After 4 hours, the culture media was replenished with fresh warmed media (DMEM High Glucose; Life Technologies). 12-16 hours after transfection, the transfected HEK293T cells were transfected with guide oligonucleotides such that the final concentration in each well was 100 nM. All transfections were carried out with Lipofectamine 3000 (0.4 μL/per well) in a 96-well format according to the manufacturer's instructions. 12-16 hours after the second transfection, the cells were washed once with ice cold PBS and total mRNA isolation was performed using Dyna Beads mRNA Direct Kit (Life Technologies) adapted for KingFisher Flex Purification (Life Technologies) according to the manufacturer's instructions. The samples were treated with TURBO DNase (Life Technologies) prior to elution. The resultant isolated mRNA was used for cDNA synthesis using SuperScript IV Vilo according to the manufacturer's instructions (Life Technologies). One μl of the cDNA was used as template for PCR (Platinum II Hot-Start PCR Master Mix; Life Technologies) using gene specific primers to generate an amplicon for Sanger sequencing (Table 4). Sanger sequencing was performed by Quintara Biosciences (Berkeley, Calif.). Adenosine to inosine editing yields were quantified by measuring the peak height of adenosine and guanosine and dividing the guanosine peak height by the total peak height measurements of adenosine and guanosine combined.

TABLE 4
Primers Used for RT-PCR

| Name | Sequence (5′ to 3′) | SEQ ID NO. |
|---|---|---|
| MECP2 | AGATGCCTTTCCAAGCATCG | 60 |
| R2554X Forward | CC | |
| MECP2 | TGGACACCAGCAGGGGCTTC | 61 |
| R2554X Reverse | | |

[0456] ADAR mediated editing of exemplary modified guide oligonucleotides targeting human MECP2 R255X are described in Table 5.

[0457] Abbreviations of various modifications are shown in the table below. For example, A, C, G and U are ribonucleosides; dA, dC, dG and dT are deoxyribonucleosides; mA, mC, mG and mU are 2′-O-methyl ribonucleosides; fA, fC, fG and fU are 2′-fluoroarabinonucleosides (FANA). The DNA triplet (dTdCdG) and the FANA triplet (fUfCfG) are indicated in bold. Mismatches are indicated in bold and underline. GluR refers to the natural ADAR substrate, GluR2 receptor pre-mRNA or longer RNA sequences that form a hairpin structure similar to GluR2.

| Modification | Abbreviation |
|---|---|
| RNA | rN |
| DNA | dN |
| 2′-O-Methyl(2′-OMe) | mN |
| 2′-F-arabinose (FANA) | fN |
| 2′-F-RNA | FN |
| 2′-O-Methoxyethyl (MOE) | MN |
| Locked Nucleic Acids (LNA) | LN |
| Abasic | ds |
| RNA-Abasic | rs |
| 2′-OMe-Abasic | mS |
| 5-Methyl-rC | rmC |
| 5-Methyl-dC | dmC |
| 5-Methyl-2′-OMe-C | mmC |
| (S)-Glycol Nucleic Acid (S-GNA) | sgN |
| (R)-Glycol Nucleic Acid (R-GNA) | rgN |
| DNA α-anomer | αN |
| Arabinose | aN |
| 2′-OMe-Arabinose | amN |
| Flexible Nucleic Acid (FNA) | fxN |
| Serineol Nucleic Acid | sN |
| β-D-homoDNA | hdN |
| β-D-HNA | hN |
| Phosphorothioate internucleoside linkage | * |

TABLE 5
Guide Oligonucleotides Targeting Human MECP2 (R255X)

| | | | | | | ADAR1 | ADAR1 |
|---|---|---|---|---|---|---|---|
| SEQ | | | | ADAR2 | ADAR2 | p1110 | p110 |
| ID | Oligo | | | % | St. | % | St. |
| NO. | ID | Length | Guide RNA Sequences | editing | Dev. | Editing | Dev. |
| | | | Human MeCP2 R255X- | | | | |
| | | | GluR-gRNA | | | | |
| | | | (R255X → R255W) | | | | |
| 62 | KB- | 63 | 5′- | 12.3 | 17.5 | 0.0 | 0.0 |
| | 021- | | mG*mU*mG*mG*mAmAmUmAmGmUmA | | | | |
| | 245 | | mUmAmAmCmAmAmUmAmUmGmCmUmA | | | | |
| | | | mAmAmUmGmUmUmUmUmUmAmUmAmG | | | | |
| | | | mUmAmUmCmCmCmAmC- | | | | |
| | | | mCmAmGmCmUmUdTdCdCmAmCmUmU | | | | |
| | | | mC*mC*mU*mG*mC-3′ | | | | |
| 63 | KB- | 65 | 5′- | 27.4 | 2.1 | 0.0 | 0.0 |
| | 021- | | mG*mU*mG*mG*mAmAmUmAmGmUmA | | | | |
| | 246 | | mUmAmAmCmAmAmUmAmUmGmCmUmA | | | | |
| | | | mAmAmUmGmUmUmGmUmUmAmUmAmG | | | | |
| | | | mUmAmUmCmCmCmAmC- | | | | |
| | | | mCmAmGmCmUmUdTdCdCmAmCmUmU | | | | |
| | | | mCmCmUdG*mC*mC*mG-3′ | | | | |
| 64 | KB- | 63 | 5′- | 0.0 | 0.0 | 0.0 | 0.0 |
| | 021- | | mG*mG*mU*mG*mAmAmGmAmGmGmA | | | | |
| | 247 | | mGmAmAmCmAmAmUmAmUmGmCmUmA | | | | |
| | | | mAmAmUmGmUmUmCmUmUmCmUmCmG | | | | |
| | | | mUmCmUmCmCmAmCmC- | | | | |
| | | | mCmAmGmCmUmUdTdCdCmAmCmUmU | | | | |
| | | | mC*mC*mU*mG*mC-3′ | | | | |
| 65 | KB- | 63 | 5′- | 13.9 | 1.7 | 0.0 | 0.0 |
| | 021- | | mG*mG*mU*mG*mUmCmGmAmGmAmA | | | | |
| | 248 | | mGmAmGmGmAmGmAmAmCmAmAmUmA | | | | |
| | | | mUmGmCmUmAmAmAmUmGmUmUmGmU | | | | |
| | | | mUmCmUmCmGmUmCmUmCmCmUmCmG | | | | |
| | | | mAmCmAmCmC- | | | | |
| | | | mCmAmGmCmUmUdTdCdCmAmCmUmU | | | | |
| | | | mC*mC*mU*mG*mC-3′ | | | | |
| | | | Human MeCP2 R255X- | | | | |
| | | | Antisense-gRNA | | | | |
| | | | (R255X → R255W) | | | | |
| 66 | KB- | 50 | 5′- | 0.0 | 0.0 | 0.0 | 0.0 |
| | 021- | | mU*mU*mU*mC*mUmUmGmGmGmAmA | | | | |
| | 249 | | mUmGmGmCmCmUmGmAmGmGmGmUmC | | | | |
| | | | mGmGmCmCmUmCmAmGmCmUmUdTdC | | | | |
| | | | dCmAmCmUmUmCmCmUmG*mC*mC* | | | | |
| | | | mG*mG-3′ | | | | |
| 67 | KB- | 50 | 5′- | 30.5 | 15.5 | 0.0 | 0.0 |
| | 021- | | mU*mU*mU*mC*mUmUmGmGmGmAmA | | | | |
| | 250 | | mUmGmGmCmCmUmGmAmGmGmGmUmC | | | | |
| | | | mGmGmCmCmUmCmAmGmCmUmUmUdC | | | | |
| | | | dCmAmCmUmUmCmCmUmG*mC*mC* | | | | |
| | | | mG*mG-3′ | | | | |
| 68 | KB- | 50 | 5′- | 0.0 | 0.0 | 11.8 | 0.0 |
| | 021- | | mU*mU*mU*mC*mUmUmGmGmGmAmA | | | | |
| | 251 | | mUmGmGmCmCmUmGmAmGmGmGmUmC | | | | |
| | | | mGmGmCmCmUmCmAmGmCmUmUdTdC | | | | |
| | | | mCmAmCmUmUmCmCmUmG*mC*mC* | | | | |
| | | | mG*mG-3′ | | | | |
| 69 | KB- | 50 | 5′- | 17.9 | 0.9 | 0.0 | 0.0 |
| | 021- | | mU*mU*mU*mC*mUmUmGmGmGmAmA | | | | |
| | 252 | | mUmGmGmCmCmUmGmAmGmAmGmUmC | | | | |
| | | | mAmGmCmCmUmCmAmGmCmUmUdTdC | | | | |
| | | | dCmAmCmUmUmCmCmUmG*mC*mC* | | | | |
| | | | mG*mG-3′ | | | | |
| 70 | KB- | 50 | 5′- | 0.0 | 0.0 | 0.0 | 0.0 |
| | 021- | | mU*mU*mU*mC*mUmUmGmGmGmAmA | | | | |
| | 253 | | mUmGmGmCmCmUmGmAmGmAmGmUmC | | | | |
| | | | mAmGmCmCmUmCmAmGmCmUmUdGdC | | | | |
| | | | dCmAmCmUmUmCmCmUmG*mC*mC* | | | | |
| | | | mG*mG-3′ | | | | |
| 71 | KB- | 50 | 5′- | 13.2 | 18.6 | 11.8 | 10.3 |
| | 021- | | mU*mU*mU*mC*mUmUmGmGmGmAmA | | | | |
| | 254 | | mUmGmGmCmCmUmGmCmGmGmGmCmC | | | | |
| | | | mGmGmCmCmUmCmAmGmCmUmUdTdC | | | | |
| | | | dCmAmCmUmUmCmCmUmG*mC*mC* | | | | |
| | | | mG*mG-3′ | | | | |
| 72 | KB- | 50 | 5′- | 17.5 | 0.7 | 0.0 | 0.0 |
| | 021- | | mU*mU*mU*mC*mUmUmGmGmGmAmA | | | | |
| | 255 | | mUmGmGmCmGmUmGmAmAmGmGmUmC | | | | |
| | | | mGmGmCmCmUmCmAmGmCmUmUdTdC | | | | |
| | | | dCmAmCmUmUmCmCmUmG*mC*mC* | | | | |
| | | | mG*mG-3′ | | | | |
| 73 | KB- | 50 | 5′- | 20.1 | 1.4 | 0.0 | 0.0 |
| | 021- | | mU*mU*mU*mC*mUmUmGmGmGmAmA | | | | |
| | 256 | | mUmGmGmCmGmUmGmAmAmGmGmUmC | | | | |
| | | | mGmGmCmCmUmCmAmGmCmUmUdGdC | | | | |
| | | | dCmAmCmUmUmCmCmUmG*mC*mC* | | | | |
| | | | mG*mG-3′ | | | | |
| 74 | KB- | 50 | 5′- | 24.6828143* | 0.0 | 11.9 | 4.5 |
| | 021- | | mU*mU*mU*mCUmUmUmGmGmGmAmA | | | | |
| | 257 | | mUmGmGmGmCmUmGmCmGmGmGmUmC | | | | |
| | | | mGmGmCmCmUmCmAmGmCmUmUdTdC | | | | |
| | | | dCmAmCmUmUmCmCmUmG*mC*mC* | | | | |
| | | | mG*mG-3′ | | | | |
| 75 | KB- | 50 | 5′- | 25.93383138* | 0.0 | 0.0 | 0.0 |
| | 021- | | mU*mU*mU*mC*mUmUmGmGmGmAmA | | | | |
| | 258 | | mUmAmGmCmCmCmGmAmGmGmGmUmC | | | | |
| | | | mGmGmCmCmUmCmAmGmCmUmUdTdC | | | | |
| | | | dCmAmCmUmUmCmCmUmG*mC*mC* | | | | |
| | | | mG*mG-3′ | | | | |
| 76 | KB- | 50 | 5′- | 9.8 | 13.9 | 6.2 | 8.8 |
| | 021- | | mU*mU*mU*mC*mUmUmGmGmGmAmA | | | | |
| | 259 | | mUmGmGmCmCmUmGmAmGmGmGmUmC | | | | |
| | | | mGmGmCmCmUmCmAmGmCmUmU [symbol] dC | | | | |
| | | | dCmAmCmUmUmCmCmUmG*mC*mC* | | | | |
| | | | mG*mG-3′ | | | | |
| 77 | KB- | 50 | 5′- | 27.7 | 1.5 | 7.6 | 13.1 |
| | 021- | | mU*mU*mU*mC*mUmUmGmGmGmAmA | | | | |
| | 260 | | mUmGmGmCmCmUmGmAmGmGmGmUmC | | | | |
| | | | mGmGmCmCmUmCmAmGmCmUmUdT [symbol] | | | | |
| | | | dCmAmCmUmUmCmCmUmG*mC*mC* | | | | |
| | | | mG*mG-3′ | | | | |
| 78 | KB- | 50 | 5′- | 0.0 | 0.0 | 26.9406393* | 0.0 |
| | 021- | | mU*mU*mU*mC*mUmUmGmGmGmAmA | | | | |
| | 261 | | mUmGmGmCmCmUmGmAmGmGmGmUmC | | | | |
| | | | mGmGmCmCmUmCmAmGmCmUmUdTdC | | | | |
| | | | [symbol] mAmCmUmUmCmCmUmG*mC*mC* | | | | |
| | | | mG*mG-3 | | | | |
| 79 | KB- | 50 | 5′- | 0.0 | 0.0 | 0.0 | 0.0 |
| | 021- | | mU*mU*mU*mC*mUmUmGmGmGmAmA | | | | |
| | 262 | | mUmGmGmCmCmUmGmAmGmGmGmUmC | | | | |
| | | | GmGmCmCmUmCmAmGmCmUmU [symbol] | | | | |
| | | | [symbol] mAmCmUmUmCmCmUmG*mC*mC* | | | | |
| | | | mG*mG-3′ | | | | |
| 80 | KB- | 50 | 5′- | 26.3 | 6.0 | 31.5 | 6.2 |
| | 021- | | mU*mU*mU*mC*mUmUmGmGmGmAmA | | | | |
| | 263 | | mUmGmGmCmCmUmGmAmGmGmGmUmC | | | | |
| | | | mGmGmCmCmUmCmAmGmCmUmUdT [symbol] | | | | |
| | | | [symbol] mAmCmUmUmCmCmUmG*mC*mC* | | | | |
| | | | mG*mG-3′ | | | | |
| 81 | KB- | 50 | 5′- | 26.3 | 14.7 | 0.0 | 0.0 |
| | 021- | | mU*mU*mU*mC*mUmUmGmGmGmAmA | | | | |
| | 264 | | mUmGmGmCmCmUmGmAmGmGmGmUmC | | | | |
| | | | mGmGmCmCmUmCmAmGmCmUmU [symbol] | | | | |
| | | | dCmAmCmUmUmCmCmUmG*mC*mC* | | | | |
| | | | mG*mG-3′ | | | | |
| 82 | KB- | 50 | 5′- | 0.0 | 0.0 | 0.0 | 0.0 |
| | 021- | | mU*mU*mU*mC*mUmUmGmGmGmAmA | | | | |
| | 589 | | mUmGmGmCmCmUmGmAmGmGmGmUmC | | | | |
| | | | mGmGmCmCmUmCmAmGmCmUmU [symbol] dC | | | | |
| | | | [symbol] mAmCmUmUmCmCmUmG*mC*mC* | | | | |
| | | | mG*mG-3′ | | | | |
| | | | Human MeCP2 R255X- | | | | |
| | | | Antisense-gRNA | | | | |
| | | | (R255X → R255W) | | | | |
| 87 | | 50 | 5′- | | | | |
| | | | mG*mC*mG*mC*mUmUmCmUmUmGmA | | | | |
| | | | mUmGmGmCmGmAmGmUmAmCmGmGmU | | | | |
| | | | mCmUmCmCmUmGmCmAmCmAmGdAdC | | | | |
| | | | dCmAmGmAmUmAmGmAmA*mG*mA* | | | | |
| | | | mC*mU-3′ | | | | |
| 101 | | 50 | 5′- | | | | |
| | | | mG*mC*mG*mC*mUmUmCmUmUmGmA | | | | |
| | | | mUmGmGmGmGmAmGmUmAmCmGmGmU | | | | |
| | | | mCmUmCmCmUmGmCmAmCmAmG [symbol] dC | | | | |
| | | | dCmAmGmAmUmAmGmAmA*mG*mA* | | | | |
| | | | mC*mU-3′ | | | | |
| 102 | | 50 | 5′- | | | | |
| | | | mG*mC*mG*mC*mUmUmCmUmUmGmA | | | | |
| | | | mUmGmGmGmGmAmGmUmAmCmGmGmU | | | | |
| | | | mCmUmCmCmUmGmCmAmCmAmGdA [symbol] | | | | |
| | | | dCmAmGmAmUmAmGmAmA*mG*mA* | | | | |
| | | | mC*mU-3′ | | | | |
| 103 | | 50 | 5′- | | | | |
| | | | mG*mC*mG*mC*mUmUmCmUmUmGmA | | | | |
| | | | mUmGmGmGmGmAmGmUmAmCmGmGmU | | | | |
| | | | mCmUmCmCmUmGmCmAmCmAmGdAdC [symbol] | | | | |
| | | | [symbol] mAmGmAmUmAmGmAmA*mG*mA* | | | | |
| | | | mC*mU-3′ | | | | |
| 104 | | 50 | 5′- | | | | |
| | | | mG*mC*mG*mC*mUmUmCmUmUmGmA | | | | |
| | | | mUmGmGmGmGmAmGmUmAmCmGmGmU | | | | |
| | | | mCmUmCmCmUmGmCmAmCmAmGdA [symbol] | | | | |
| | | | [symbol] mAmGmAmUmAmGmAmA*mG*mA* | | | | |
| | | | mC*mU-3′ | | | | |
| 105 | | 50 | 5′- | | | | |
| | | | mG*mC*mG*mC*mUmUmCmUmUmGmA | | | | |
| | | | mUmGmGmGmGmAmGmUmAmCmGmGmU | | | | |
| | | | mCmUmCmCmUmGmCmAmCmAmG [symbol] | | | | |
| | | | dCmAmGmAmUmAmGmAmA*mG*mA* | | | | |
| | | | mC*mU-3′ | | | | |
| 106 | | 50 | 5′- | | | | |
| | | | mG*mC*mG*mC*mUmUmCmUmUmGmA | | | | |
| | | | mUmGmGmGmGmAmGmUmAmCmGmGmU | | | | |
| | | | mCmUmCmCmUmGmCmAmCmAmG [symbol] | | | | |
| | | | [symbol] mAmGmAmUmAmGmAmA*mG*mA* | | | | |
| | | | mC*mU-3′ | | | | |
| 107 | | 50 | 5′- | | | | |
| | | | mG*mC*mG*mC*mUmUmCmUmUmGmA | | | | |
| | | | mUmGmGmGmGmAmGmUmAmCmGmGmU | | | | |
| | | | mCmUmCmCmUmGmCmAmCmAmG [symbol] dC | | | | |
| | | | dCmAmGmAmUmAmGmAmA*mG*mA* | | | | |
| | | | mC*mU-3′ | | | | |
| 108 | | 50 | 5′- | | | | |
| | | | mG*mC*mG*mC*mUmUmCmUmUmGmA | | | | |
| | | | mUmGmGmGmGmAmGmUmAmCmGmGmU | | | | |
| | | | mCmUmCmCmUmGmCmAmCmAmGdA [symbol] | | | | |
| | | | dCmAmGmAmUmAmGmAmA*mG*mA* | | | | |
| | | | mC*mU-3′ | | | | |
| 109 | | 50 | 5′- | | | | |
| | | | mG*mC*mG*mC*mUmUmCmUmUmGmA | | | | |
| | | | mUmGmGmGmGmAmGmUmAmCmGmGmU | | | | |
| | | | mCmUmCmCmUmGmCmAmCmAmGdAdC | | | | |
| | | | [symbol] mAmGmAmUmAmGmAmA*mG*mA* | | | | |
| | | | mC*mU-3′ | | | | |
| 110 | | 50 | 5′- | | | | |
| | | | mG*mC*mG*mC*mUmUmCmUmUmGmA | | | | |
| | | | mUmGmGmGmGmAmGmUmAmCmGmGmU | | | | |
| | | | mCmUmCmCmUmGmCmAmCmAmG [symbol] | | | | |
| | | | CmAmGmAmUmAmGmAmA*mG*mA* | | | | |
| | | | mC*mU-3′ | | | | |
| 111 | | 50 | 5′- | | | | |
| | | | mG*mC*mG*mC*mUmUmCmUmUmGmA | | | | |
| | | | mUmGmGmGmGmAmGmUmAmCmGmGmU | | | | |
| | | | mCmUmCmCmUmGmCmAmCmAmCamA | | | | |
| | | | dCdCmAmGmAmUmAmGmAmA*mG*mA* | | | | |
| | | | mC*mU-3′ | | | | |
| 112 | | 50 | 5′- | | | | |
| | | | mG*mC*mG*mC*mUmUmCmUmUmGmA | | | | |
| | | | mUmGmGmGmGmAmGmUmAmCmGmGmU | | | | |
| | | | mCmUmCmCmUmGmCmAmCmAmGdAa | | | | |
| | | | mCdCmAmGmAmUmAmGmAmA*mG*mA* | | | | |
| | | | mC*mU-3′ | | | | |
| 113 | | 50 | 5′- | | | | |
| | | | mG*mC*mG*mC*mUmUmCmUmUmGmA | | | | |
| | | | mUmGmGmGmGmAmGmUmAmCmGmGmU | | | | |
| | | | mCmUmCmCmUmGmCmAmCmAmGdAdC | | | | |
| | | | amCmAmGmAmUmAmGmAmA*mG*mA* | | | | |
| | | | mC*mU-3′ | | | | |
| 114 | | 50 | 5′- | | | | |
| | | | mG*mC*mG*mC*mUmUmCmUmUmGmA | | | | |
| | | | mUmGmGmGmGmAmGmUmAmCmGmGmU | | | | |
| | | | mCmUmCmCmUmGmCmAmCmAmGdA [symbol] | | | | |
| | | | dCmAmGmAmUmAmGmAmA*mG*mA* | | | | |
| | | | mC*mU-3′ | | | | |
| 115 | | 50 | 5′- | | | | |
| | | | mG*mC*mG*mC*mUmUmCmUmUmGmA | | | | |
| | | | mUmGmGmGmGmAmGmUmAmCmGmGmU | | | | |
| | | | mCmUmCmCmUmGmCmAmCmAmGdA [symbol] | | | | |
| | | | dCmAmGmAmUmAmGmAmA*mG*mA* | | | | |
| | | | mC*mU-3′ | | | | |
| 116 | | 50 | 5′- | | | | |
| | | | mG*mC*mG*mC*mUmUmCmUmUmGmA | | | | |
| | | | mUmGmGmGmGmAmGmUmAmCmGmGmU | | | | |
| | | | mCmUmCmCmUmGmCmAmCmAmGdA [symbol] | | | | |
| | | | dCmAmGmAmlmAmGmAmA*mG*mA* | | | | |
| | | | mC*mu-3′ | | | | |
| 117 | | 50 | 5′- | | | | |
| | | | mG*mC*mG*mC*mUmUmCmUmUmGmA | | | | |
| | | | mUmGmGmGmGmAmGmUmAmCmGmGmU | | | | |
| | | | mCmUmCmCmUmGmCmAmCmAmGdA [symbol] | | | | |
| | | | dCmAmGmAmUmAmGmAmA*mG*mA* | | | | |
| | | | mC*mU-3′ | | | | |
| 118 | | 50 | 5′- | | | | |
| | | | mG*mC*mG*mC*mUmUmCmUmUmGmA | | | | |
| | | | mUmGmGmGmGmAmGmUmAmCmGmGmU | | | | |
| | | | mCmUmCmCmUmGmCmAmCmAmG [symbol] dC | | | | |
| | | | dCmAmGmAmUmAmGmAmA*mG*mA* | | | | |
| | | | mC*mU-3′ | | | | |
| 119 | | 50 | 5′- | | | | |
| | | | mG*mC*mG*mC*mUmUmCmUmUmGmA | | | | |
| | | | mUmGmGmGmGmAmGmUmAmCmGmGmU | | | | |
| | | | mCmUmCmCmUmGmCmAmCmAmGdA [symbol] | | | | |
| | | | dCmAmGmAmUmAmGmAmA*mG*mA* | | | | |
| | | | mC*mU-3′ | | | | |
| 120 | | 50 | 5′- | | | | |
| | | | mG*mC*mG*mC*mUmUmCmUmUmGmA | | | | |
| | | | mUmGmGmGmGmAmGmUmAmCmGmGmU | | | | |
| | | | mCmUmCmCmUmGmCmAmCmAmG [symbol] | | | | |
| | | | CdCmAmGmAmUmAmGmAmA*mG*mA* | | | | |
| | | | mC*mU-3′ | | | | |
| 121 | | 50 | 5′- | | | | |
| | | | mG*mC*mG*mC*mUmUmCmUmUmGmA | | | | |
| | | | mUmGmGmGmGmAmGmUmAmCmGmGmU | | | | |
| | | | mCmUmCmCmUmGmCmAmCmAmGrgAdC | | | | |
| | | | dCmAmGmAmUmAmGmAmA*mG*mA* | | | | |
| | | | mC*mU-3′ | | | | |
| 122 | | 50 | 5′- | | | | |
| | | | mG*mC*mG*mC*mUmUmCmUmUmGmA | | | | |
| | | | mUmGmGmGmGmAmGmUmAmCmGmGmU | | | | |
| | | | mCmUmCmCmUmGmCmAmCmAmCdArgC | | | | |
| | | | dCmAmGmAmUmAmGGmAmA*mG*mA* | | | | |
| | | | mC*mU-3′ | | | | |
| 123 | | 50 | 5′- | | | | |
| | | | mG*mC*mG*mC*mUmUmCmUmUmGmA | | | | |
| | | | mUmGmGmGmGmAmGmUmAmCmGmGmU | | | | |
| | | | mCmUmCmCmUmGmCmAmCmAmGdAdC | | | | |
| | | | rgCmAmGmAmUmAmGmAmA*mG*mA* | | | | |
| | | | mC*mU-3′ | | | | |
| 124 | | 50 | 5′- | | | | |
| | | | mG*mC*mG*mC*mUmUmCmUmUmGmA | | | | |
| | | | mUmGmGmGmGmAmGmUmAmCmGmGmU | | | | |
| | | | mCmUmCmCmUmGmCmAmCmAmG [symbol] dC | | | | |
| | | | dCmAmGmAmUmAmGmAmA*mG*mA* | | | | |
| | | | mC*mU-3′ | | | | |
| 125 | | 50 | 5′- | | | | |
| | | | mG*mC*mG*mC*mUmUmCmUmUmGmA | | | | |
| | | | mUmGmGmGmGmAmGmUmAmCmGmGmU | | | | |
| | | | mCmUmCmCmUmGmCmAmCmAmGdA [symbol] | | | | |
| | | | dCmAmGmAmUmAmGmAmA*mG*mA* | | | | |
| | | | mC*mu-3′ | | | | |
| 126 | | 50 | 5′- | | | | |
| | | | mG*mC*mG*mC*mUmUmCmUmUmGmA | | | | |
| | | | mUmGmGmGmGmAmGmUmAmCmGmGmU | | | | |
| | | | mCmUmCmCmUmGmCmAmCmAmGdAdC [symbol] | | | | |
| | | | CmAmGmAmUmAmGmAmA*mG*mA* | | | | |
| | | | mC*mU-3′ | | | | |
| 127 | | 50 | 5′- | | | | |
| | | | mG*mC*mG*mC*mUmUmCmUmUmGmA | | | | |
| | | | mUmGmGmGmGmAmGmUmAmCmGmGmU | | | | |
| | | | mCmUmCmCmUmGmCmAmCmAmG [symbol] dC | | | | |
| | | | dCmAmGmAmUmAmGmAmA*mG*mA* | | | | |
| | | | mC*mU-3′ | | | | |
| 128 | | 50 | 5′- | | | | |
| | | | mG*mC*mG*mC*mUmUmCmUmUmGmA | | | | |
| | | | mUmGmGmGmGmAmGmUmAmCmGmGmU | | | | |
| | | | mCmUmCmCmUmGmCmAmCmAmGdA [symbol] | | | | |
| | | | dCmAmGmAmUmAmGmAmA*mG*mA* | | | | |
| | | | mC*mU-3′ | | | | |
| 129 | | 50 | 5′- | | | | |
| | | | mG*mC*mG*mC*mUmUmCmUmUmGmA | | | | |
| | | | mUmGmGmGmGmAmGmUmAmCmGmGmU | | | | |
| | | | mCmUmCmCmUmGmCmAmCmAmGdAdC [symbol] | | | | |
| | | | [symbol] mAmGmAmUmAmGmAmA*mG*mA* | | | | |
| | | | mC*mU-3 | | | | |
| 130 | | 50 | 5′- | | | | |
| | | | mG*mC*mG*mC*mUmUmCmUmUmGmA | | | | |
| | | | mUmGmGmGmGmAmGmUmAmCmGmGmU | | | | |
| | | | mCmUmCmCmUmGmCmAmCmAmG [symbol] dC | | | | |
| | | | dCmAmGmAmUmAmGmAmA*mG*mA* | | | | |
| | | | mC*mU-3′ | | | | |
| 131 | | 50 | 5′- | | | | |
| | | | mG*mC*mG*mC*mUmUmCmUmUmGmA | | | | |
| | | | mUmGmGmGmGmAmGmUmAmCmGmGmU | | | | |
| | | | mCmUmCmCmUmGmCmAmCmAmGdA [symbol] | | | | |
| | | | dCmAmGmAmUmAmGmAmA*mG*mA* | | | | |
| | | | mC*mU-3′ | | | | |
| 132 | | 50 | 5′- | | | | |
| | | | mG*mC*mG*mC*mUmUmCmUmUmGmA | | | | |
| | | | mUmGmGmGmGmAmGmUmAmCmGmGmU | | | | |
| | | | mCmUmCmCmUmGmCmAmCmAmGdAdC | | | | |
| | | | [symbol] mAmCmAmUmAmGmAmA*mG*mA* | | | | |
| | | | mC*mU-3′ | | | | |
| 133 | | 50 | 5′- | | | | |
| | | | mG*mC*mG*mC*mUmUmCmUmUmGmA | | | | |
| | | | mUmGmGmGmGmAmGmUmAmCmGmGmU | | | | |
| | | | mCmUmCmCmUmGmCmAmCmAmG [symbol] dC | | | | |
| | | | dCmAmGmAmUmAmGmAmA*mG*mA* | | | | |
| | | | mC*mU-3′ | | | | |
| 134 | | 50 | 5′- | | | | |
| | | | mG*mC*mG*mC*mUmUmCmUmUmGmA | | | | |
| | | | mUmGmGmCmGmAmGmUmAmCmGmGmU | | | | |
| | | | mCmUmCmCmUmGmCmAmCmAmGdA [symbol] | | | | |
| | | | dCmAmGmAmUmAmGmAmA*mG*mA* | | | | |
| | | | mC*mU-3′ | | | | |
| 135 | | 50 | 5′- | | | | |
| | | | mG*mC*mG*mC*mUmUmCmUmUmGmA | | | | |
| | | | mUmGmGmGmGmAmGmUmAmCmGmGmU | | | | |
| | | | mCmUmCmCmUmGmCmAmCmAmGdAdC | | | | |
| | | | [symbol] mAmGmAmUmAmGmAmA*mG*mA* | | | | |
| | | | mC*mU-3′ | | | | |
| 136 | | 50 | 5′- | | | | |
| | | | mG*mC*mG*mC*mUmUmCmUmUmGmA | | | | |
| | | | mUmGmGmGmGmAmGmUmAmCmGmGmU | | | | |
| | | | mCmUmCmCmUmGmCmAmCmAmG [symbol] | | | | |
| | | | dCmAmGmAmUmAmCmAmA*mG*mA* | | | | |
| | | | mC*mU-3′ | | | | |
| 137 | | 50 | 5′- | | | | |
| | | | mG*mC*mG*mC*mUmUmCmUmUmGmA | | | | |
| | | | mUmGmGmGmGmAmGmUmAmCmGmGmU | | | | |
| | | | mCmUmCmCmUmGmCmAmCmAmGdA [symbol] | | | | |
| | | | [symbol] mAmGmAmUmAmGmAmA*mG*mA* | | | | |
| | | | mC*mU-3′ | | | | |
| 138 | | 50 | 5′- | | | | |
| | | | mG*mC*mG*mC*mUmUmCmUmUmGmA | | | | |
| | | | mUmGmGmGmGmAmGmUmAmCmGmGmU | | | | |
| | | | mCmUmCmCmUmGmCmAmCmAmG [symbol] dC | | | | |
| | | | dImAmGmAmUmAmGmAmA*mG*mA* | | | | |
| | | | mC*mU-3′ | | | | |
| 139 | | 50 | 5′- | | | | |
| | | | mG*mC*mG*mC*mUmUmCmUmUmGmA | | | | |
| | | | mUmGmGmGmGmAmGmUmAmCmGmGmU | | | | |
| | | | mCmUmCmCmUmGmCmAmCmAmGdIdI | | | | |
| | | | dImAmGmAmUmAmGmAmA*mG*mA* | | | | |
| | | | mC*mU-3′ | | | | |
| | | | Human MeCP2 R255X- | | | | |
| | | | GluR-gRNA | | | | |
| | | | (R255X → R255W) | | | | |
| 83 | | 63 | 5′- | | | | |
| | | (45 + 18) | mG*mU*mG*mG*mAmAmUmAmGmUmA | | | | |
| | | | mUmAmAmCmAmAmUmAmUmGmCmUmA | | | | |
| | | | mAmAmUmGmUmUmGmUmUmAmUmAmG | | | | |
| | | | mUmAmUmCmCmCmAmC- | | | | |
| | | | mGmCmAmCmAmGdAdCdCmAmGmAmU | | | | |
| | | | mA*mG*mA*mA*mG-3′ | | | | |
| 140 | | 63 | 5′- | | | | |
| | | (45 + 18) | mG*mU*mG*mG*mAmAmUmAmGmUmA | | | | |
| | | | mUmAmAmCmAmAmUmAmUmGmCmUmA | | | | |
| | | | mAmAmUmGmUmUmGmUmUmAmUmAmG | | | | |
| | | | mUmAmUmCmCmCmAmC- | | | | |
| | | | mGmCmAmCmAmG [symbol] dCdCmAmGmAmU | | | | |
| | | | mA*mG*mA*mA*mG-3′ | | | | |
| 141 | | 63 | 5′- | | | | |
| | | (45 + 18) | mG*mU*mG*mG*mAmAmUmAmGmUmA | | | | |
| | | | mUmAmAmCmAmAmUmAmUmGmCmUmA | | | | |
| | | | mAmAmUmGmUmUmGmUmUmAmUmAmG | | | | |
| | | | mUmAmUmCmCmCmAmC- | | | | |
| | | | mGmCmAmCmAmGdA [symbol] dCmAmGmAmU | | | | |
| | | | mA*mG*mA*mA*mG-3′ | | | | |
| 142 | | 63 | 5′- | | | | |
| | | (45 + 18) | mG*mU*mG*mG*mAmAmUmAmGmUmA | | | | |
| | | | mUmAmAmCmAmAmUmAmUmGmCmUmA | | | | |
| | | | mAmAmUmGmUmUmGmUmUmAmUmAmG | | | | |
| | | | mUmAmUmCmCmCmAmC- | | | | |
| | | | mGmCmAmCmAmGdAdC [symbol] mAmGmAmU | | | | |
| | | | mA*mG*mA*mA*mG-3′ | | | | |
| 143 | | 63 | 5′- | | | | |
| | | (45 + 18) | mG*mU*mG*mG*mAmAmUmAmGmUmA | | | | |
| | | | mUmAmAmCmAmAmUmAmUmGmCmUmA | | | | |
| | | | mAmAmUmGmUmUmGmUmUmAmUmAmG | | | | |
| | | | mUmAmUmCmGmCmAmC- | | | | |
| | | | mGmCmAmCmAmGdA [symbol] mAmGmAmU | | | | |
| | | | mA*mG*mA*mA*mG-3′ | | | | |
| 144 | | 63 | 5′- | | | | |
| | | (45 + 18) | mG*mU*mG*mG*mAmAmUmAmGmUmA | | | | |
| | | | mUmAmAmCmAmAmUmAmUmGmCmUmA | | | | |
| | | | mAmAmUmGmUmUmGmUmUmAmUmAmG | | | | |
| | | | mUmAmUmCmCmCmAmC- | | | | |
| | | | mGmCmAmCmAmG [symbol] dCmAmGmAmU | | | | |
| | | | mA*mG*mA*mA*mG-3′ | | | | |
| 145 | | 63 | 5′- | | | | |
| | | (45 + 18) | mG*mU*mG*mG*mAmAmUmAmGmUmA | | | | |
| | | | mUmAmAmCmAmAmUmAmUmGmCmUmA | | | | |
| | | | mAmAmUmGmUmUmGmUmUmAmUmAmG | | | | |
| | | | mUmAmUmCmCmCmAmC- | | | | |
| | | | mGmCmAmCmAmG [symbol] mAmGmAmU | | | | |
| | | | mA*mG*mA*mA*mG-3′ | | | | |
| 146 | | 63 | 5′- | | | | |
| | | (45 + 18) | mG*mU*mG*mG*mAmAmUmAmGmUmA | | | | |
| | | | mUmAmAmCmAmAmUmAmUmGmCmUmA | | | | |
| | | | mAmAmUmGmUmUmGmUmUmAmUmAmG | | | | |
| | | | mUmAmUmCmCmCmAmC- | | | | |
| | | | mGmCmAmCmAmG [symbol] dCdCmAmGmAmU | | | | |
| | | | mA*mG*mA*mA*mG-3′ | | | | |
| 147 | | 63 | 5′- | | | | |
| | | (45 + 18) | mG*mU*mG*mG*mAmAmUmAmGmUmA | | | | |
| | | | mUmAmAmCmAmAmUmAmUmGmCmUmA | | | | |
| | | | mAmAmUmGmUmUmGmUmUmAmUmAmG | | | | |
| | | | mUmAmUmCmGmCmAmC- | | | | |
| | | | mGmCmAmCmAmGdA [symbol] dCmAmGmAmU | | | | |
| | | | mA*mG*mA*mA*mG-3′ | | | | |
| 148 | | 63 | 5′- | | | | |
| | | (45 + 18) | mG*mU*mG*mG*mAmAmUmAmGmUmA | | | | |
| | | | mUmAmAmCmAmAmUmAmUmGmCmUmA | | | | |
| | | | mAmAmUmGmUmUmGmUmUmAmUmAmG | | | | |
| | | | mUmAmUmCmCmCmAmC- | | | | |
| | | | mGmCmAmCmAmGdAdCaCmAmGmAmU | | | | |
| | | | mA*mG*mA*mA*mG-3′ | | | | |
| 149 | | 63 | 5′- | | | | |
| | | (45 + 18) | mG*mU*mG*mG*mAmAmUmAmGmUmA | | | | |
| | | | mUmAmAmCmAmAmUmAmUmGmCmUmA | | | | |
| | | | mAmAmUmGmUmUmGmUmUmAmUmAmG | | | | |
| | | | mUmAmUmCmCmCmAmC- | | | | |
| | | | mGmCmAmCmAmGaAaCaCmAmGmAmU | | | | |
| | | | mA*mG*mA*mA*mG-3′ | | | | |
| 150 | | 63 | 5′- | | | | |
| | | (45 + 18) | mG*mU*mG*mG*mAmAmUmAmGmUmA | | | | |
| | | | mUmAmAmCmAmAmUmAmUmGmCmUmA | | | | |
| | | | mAmAmUmGmUmUmGmUmUmAmUmAmG | | | | |
| | | | mUmAmUmCmCmCmAmC- | | | | |
| | | | mGmCmAmCmAmGamAdCdCmAmGmA | | | | |
| | | | mUmA*mG*mA*mA*mG-3′ | | | | |
| 151 | | 63 | 5′- | | | | |
| | | (45 + 18) | mG*mU*mG*mG*mAmAmUmAmGmUmA | | | | |
| | | | mUmAmAmCmAmAmUmAmUmGmCmUmA | | | | |
| | | | mAmAmUmGmUmUmGmUmUmAmUmAmG | | | | |
| | | | mUmAmUmCmCmCmAmC- | | | | |
| | | | mGmCmAmCmAmGdAamCdCmAmGmA | | | | |
| | | | mUmA*mG*mA*mA*mG-3′ | | | | |
| 152 | | 63 | 5′- | | | | |
| | | (45 + 18) | mG*mU*mG*mG*mAmAmUmAmGmUmA | | | | |
| | | | mUmAmAmCmAmAmUmAmUmGmCmUmA | | | | |
| | | | mAmAmUmGmUmUmGmUmUmAmUmAmG | | | | |
| | | | mUmAmUmCmCmCmAmC- | | | | |
| | | | mGmCmAmCmAmGdAdCamCmAmGmA | | | | |
| | | | mUmA*mG*mA*mA*mG-3′ | | | | |
| 153 | | 63 | 5′- | | | | |
| | | (45 + 18) | mG*mU*mG*mG*mAmAmUmAmGmUmA | | | | |
| | | | mUmAmAmCmAmAmUmAmUmGmCmUmA | | | | |
| | | | mAmAmUmGmUmUmGmUmUmAmUmAmG | | | | |
| | | | mUmAmUmCmCmCmAmC- | | | | |
| | | | mGmCmAmCmAmGdA [symbol] dCmAmGmAmU | | | | |
| | | | mA*mG*mA*mA*mG-3′ | | | | |
| 154 | | 63 | 5′- | | | | |
| | | (45 + 18) | mG*mU*mG*mG*mAmAmUmAmGmUmA | | | | |
| | | | mUmAmAmCmAmAmUmAmUmGmCmUmA | | | | |
| | | | mAmAmUmGmUmUmGmUmUmAmUmAmG | | | | |
| | | | mUmAmUmCmCmCmAmC- | | | | |
| | | | mGmCmAmCmAmGdA [symbol] dCmAmGmAmU | | | | |
| | | | mA*mG*mA*mA*mG-3′ | | | | |
| 155 | | 63 | 5′- | | | | |
| | | (45 + 18) | mG*mU*mG*mG*mAmAmUmAmGmUmA | | | | |
| | | | mUmAmAmCmAmAmUmAmUmGmCmUmA | | | | |
| | | | mAmAmUmGmUmUmGmUmUmAmUmAmG | | | | |
| | | | mUmAmUmCmCmCmAmC- | | | | |
| | | | mGmCmAmCmAmGdA [symbol] dCmAmGmAmU | | | | |
| | | | mA*mG*mA*mA*mG-3′ | | | | |
| 156 | | 63 | 5′- | | | | |
| | | (45 + 18) | mG*mU*mG*mG*mAmAmUmAmGmUmA | | | | |
| | | | mUmAmAmCmAmAmUmAmUmGmCmUmA | | | | |
| | | | mAmAmUmGmUmUmGmUmUmAmUmAmG | | | | |
| | | | mUmAmUmCmCmCmAmC- | | | | |
| | | | mGmCmAmCmAmGdA [symbol] dCmAmGmAmU | | | | |
| | | | mA*mG*mA*mA*mG-3′ | | | | |
| 157 | | 63 | 5′- | | | | |
| | | (45 + 18) | mG*mU*mG*mG*mAmAmUmAmGmUmA | | | | |
| | | | mUmAmAnCmAmAmUmAmUmGmCmUmA | | | | |
| | | | mAmAmUmGmUmUmGmUmUmAmUmAmG | | | | |
| | | | mUmAmUmCmCmCmAmG- | | | | |
| | | | mGmCmAmCmAmGsgAdCdCmAmGmA | | | | |
| | | | mUmA*mG*mA*mA*mG-3′ | | | | |
| 158 | | 63 | 5′- | | | | |
| | | (45 + 18) | mG*mU*mG*mG*mAmAmUmAmGmUmA | | | | |
| | | | mUmAmAmCmAmAmUmAmUmGmCmUmA | | | | |
| | | | mAmAmUmGmUmUmGmUmUmAmUmAmG | | | | |
| | | | mUmAmUmCmCmCmAmC- | | | | |
| | | | mGmCmAmCmAmGdAsgCdCmAmGmA | | | | |
| | | | mUmA*mG*mA*mA*mG-3′ | | | | |
| 159 | | 63 | 5′- | | | | |
| | | (45 + 18) | mG*mU*mG*mG*mAmAmUmAmGmUmA | | | | |
| | | | mUmAmAmCmAmAmUmAmUmGmCmUmA | | | | |
| | | | mAmAmUmGmUmUmGmUmUmAmUmAmG | | | | |
| | | | mUmAmUmCmCmCmAmC- | | | | |
| | | | mGmCmAmCmAmGsgAsgCdCmAmGmA | | | | |
| | | | mUmA*mG*mA*mA*mG-3′ | | | | |
| 160 | | 63 | 5′- | | | | |
| | | (45 + 18) | mG*mU*mG*mG*mAmAmUmAmGmUmA | | | | |
| | | | mUmAmAmCmAmAmUmAmUmGmCmUmA | | | | |
| | | | mAmAmUmGmUmUmGmUmUmAmUmAmG | | | | |
| | | | mUmAmUmCmCmCmAmC- | | | | |
| | | | mGmCmAmCmAmGrgAdCdCmAmGmA | | | | |
| | | | mUmA*mG*mA*mA*mG-3′ | | | | |
| 161 | | 63 | 5′- | | | | |
| | | (45 + 18) | mG*mU*mG*mG*mAmAmUmAmGmUmA | | | | |
| | | | mUmAmAmCmAmAmUmAmUmGmCmUmA | | | | |
| | | | mAmAmUmGmUmUmGmUmUmAmUmAmG | | | | |
| | | | mUmAmUmCmCmCmAmC- | | | | |
| | | | mGmCmAmCmAmGdArgCdCmAmGmA | | | | |
| | | | mUmA*mG*mA*mA*mG-3′ | | | | |
| 162 | | 63 | 5′- | | | | |
| | | (45 + 18) | mG*mU*mG*mG*mAmAmUmAmGmUmA | | | | |
| | | | mUmAmAmCmAmAmUmAmUmGmCmUmA | | | | |
| | | | mAmAmUmGmUmUmGmUmUmAmUmAmG | | | | |
| | | | mUmAmUmCmCmCmAmC- | | | | |
| | | | mGmCmAmCmAmGdAdCrgCmAmGmA | | | | |
| | | | mUmA*mG*mA*mA*mG-3′ | | | | |
| 163 | | 63 | 5′- | | | | |
| | | (45 + 18) | mG*mU*mG*mG*mAmAmUmAmGmUmA | | | | |
| | | | mUmAmAmCmAmAmUmAmUmGmCmUmA | | | | |
| | | | mAmAmUmGmUmUmGmUmUmAmUmAmG | | | | |
| | | | mUmAmUmCmCmCmAmC- | | | | |
| | | | mGmCmAmCmAmG [symbol] dCdCmAmGmAmU | | | | |
| | | | mA*mG*mA*mA*mG-3′ | | | | |
| 164 | | 63 | 5′- | | | | |
| | | (45 + 18) | mG*mU*mG*mG*mAmAmUmAmGmUmA | | | | |
| | | | mUmAmAmCmAmAmUmAmUmGmCmUmA | | | | |
| | | | mAmAmUmGmUmUmGmUmUmAmUmAmG | | | | |
| | | | mUmAmUmCmCmCmAmC- | | | | |
| | | | mGmCmAmCmAmGdA [symbol] dCmAmGmAmU | | | | |
| | | | mA*mG*mA*mA*mG-3′ | | | | |
| 165 | | 63 | 5′- | | | | |
| | | (45 + 18) | mG*mU*mG*mG*mAmAmUmAmGmUmA | | | | |
| | | | mUmAmAmCmAmAmUmAmUmGmCmUmA | | | | |
| | | | mAmAmUmGmUmUmGmUmUmAmUmAmG | | | | |
| | | | mUmAmUmCmCmCmAmC- | | | | |
| | | | mGmCmAmCmAmGdAdC [symbol] mAmGmAmU | | | | |
| | | | mA*mG*mA*mA*mG-3′ | | | | |
| 166 | | 63 | 5′- | | | | |
| | | (45 + 18) | mG*mU*mG*mG*mAmAmUmAmGmUmA | | | | |
| | | | mUmAmAmCmAmAmUmAmUmGmCmUmA | | | | |
| | | | mAmAmUmGmUmUmGmUmUmAmUmAmG | | | | |
| | | | mUmAmUmCmCmCmAmC- | | | | |
| | | | mGmCmAmCmAmG [symbol] dCdCmAmGmAmU | | | | |
| | | | mA*mG*mA*mA*mG-3′ | | | | |
| 167 | | 63 | 5′- | | | | |
| | | (45 + 18) | mG*mU*mG*mG*mAmAmUmAmGmUmA | | | | |
| | | | mUmAmAmCmAmAmUmAmUmGmCmUmA | | | | |
| | | | mAmAmUmGmUmUmGmUmUmAmUmAmG | | | | |
| | | | mUmAmUmCmCmCmAmC- | | | | |
| | | | mGmCmAmCmAmGdA [symbol] dCmAmGmAmU | | | | |
| | | | mA*mG*mA*mA*mG-3′ | | | | |
| 168 | | 63 | 5′- | | | | |
| | | (45 + 18) | mG*mU*mG*mG*mAmAmUmAmGmUmA | | | | |
| | | | mUmAmAmCmAmAmUmAmUmGmCmUmA | | | | |
| | | | mAmAmUmGmUmUmGmUmUmAmUmAmG | | | | |
| | | | mUmAmUmCmCmCmAmC- | | | | |
| | | | mGmCmAmCmAmGdAdC [symbol] mAmGmAmU | | | | |
| | | | mA*mG*mA*mA*mG-3′ | | | | |
| 169 | | 63 | 5′- | | | | |
| | | (45 + 18) | mG*mU*mG*mG*mAmAmUmAmGmUmA | | | | |
| | | | mUmAmAmCmAmAmUmAmUmGmCmUmA | | | | |
| | | | mAmAmUmGmUmUmGmUmUmAmUmAmG | | | | |
| | | | mUmAmUmCmCmCmAmC- | | | | |
| | | | mGmCmAmCmAmG [symbol] dCdCmAmGmAmU | | | | |
| | | | mA*mG*mA*mA*mG-3′ | | | | |
| 170 | | 63 | 5′- | | | | |
| | | (45 + 18) | mG*mU*mG*mG*mAmAmUmAmGmUmA | | | | |
| | | | mUmAmAmCmAmAmUmAmUmGmCmUmA | | | | |
| | | | mAmAmUmGmUmUmGmUmUmAmUmAmG | | | | |
| | | | mUmAmUmCmCmCmAmC- | | | | |
| | | | mGmCmAmCmAmGdA [symbol] dCmAmGmAmU | | | | |
| | | | mA*mG*mA*mA*mG-3′ | | | | |
| 171 | | 63 | 5′- | | | | |
| | | (45 + 18) | mG*mU*mG*mG*mAmAmUmAmGmUmA | | | | |
| | | | mUmAmAmCmAmAmUmAmUmGmCmUmA | | | | |
| | | | mAmAmUmGmUmUmGmUmUmAmUmAmG | | | | |
| | | | mUmAmUmCmCmCmAmC- | | | | |
| | | | mGmCmAmCmAmGdAdC [symbol] mAmGmAmU | | | | |
| | | | mA*mG*mA*mA*mG-3′ | | | | |
| 172 | | 63 | 5′- | | | | |
| | | (45 + 18) | mG*mU*mG*mG*mAmAmUmAmGmUmA | | | | |
| | | | mUmAmAmCmAmAmUmAmUmGmCmUmA | | | | |
| | | | mAmAmUmGmUmUmGmUmUmAmUmAmG | | | | |
| | | | mUmAmUmCmCmCmAmC- | | | | |
| | | | mGmCmAmCmAmGdIdCdCmAmGmAmU | | | | |
| | | | mA*mG*mA*mA*mG-3′ | | | | |
| 173 | | 63 | 5′- | | | | |
| | | (45 + 18) | mG*mU*mG*mG*mAmAmUmAmGmUmA | | | | |
| | | | mUmAmAmCmAmAmUmAmUmGmCmUmA | | | | |
| | | | mAmAmUmGmUmUmGmUmUmAmUmAmG | | | | |
| | | | mUmAmUmCmCmCmAmC- | | | | |
| | | | mGmCmAmCmAmGdAdIdCmAmGmAmU | | | | |
| | | | mA*mG*mA*mA*mG-3′ | | | | |
| 174 | | 63 | 5′- | | | | |
| | | (45 + 18) | mG*mU*mG*mG*mAmAmUmAmGmUmA | | | | |
| | | | mUmAmAmCmAmAmUmAmUmGmCmUmA | | | | |
| | | | mAmAmUmGmUmUmGmUmUmAmUmAmG | | | | |
| | | | mUmAmUmCmCmCmAmC- | | | | |
| | | | mGmCmAmCmAmGdAdCdImAmGmAmU | | | | |
| | | | mA*mG*mA*mA*mG-3′ | | | | |
| 175 | | 63 | 5′- | | | | |
| | | (45 + 18) | mG*mU*mG*mG*mAmAmUmAmGmUmA | | | | |
| | | | mUmAmAmCmAmAmUmAmUmGmCmUmA | | | | |
| | | | mAmAmUmGmUmUmGmUmUmAmUmAmG | | | | |
| | | | mUmAmUmCmCmCmAmC- | | | | |
| | | | mGmCmAmCmAmGdIdIdCmAmGmAmU | | | | |
| | | | mA*mG*mA*mA*mG-3′ | | | | |
| 176 | | 63 | 5′- | | | | |
| | | (45 + 18) | mG*mU*mG*mG*mAmAmUmAmGmUmA | | | | |
| | | | mUmAmAmCmAmAmUmAmUmGmCmUmA | | | | |
| | | | mAmAmUmGmUmUmGmUmUmAmUmAmG | | | | |
| | | | mUmAmUmCmCmCmAmC- | | | | |
| | | | mGmCmAmCmAmGdAdIdImAmGmAmU | | | | |
| | | | mA*mG*mA*mA*mG-3′ | | | | |
| 177 | | 63 | 5′- | | | | |
| | | (45 + 18) | mG*mU*mG*mG*mAmAmUmAmGmUmA | | | | |
| | | | mUmAmAmCmAmAmUmAmUmGmCmUmA | | | | |
| | | | mAmAmUmGmUmUmGmUmUmAmUmAmG | | | | |
| | | | mUmAmUmCmCmCmAmC- | | | | |
| | | | mGmCmAmCmAmGdIdCdImAmGmAmU | | | | |
| | | | mA*mG*mA*mA*mG-3 | | | | |
| 178 | | 63 | 5′- | | | | |
| | | (45 + 18) | mG*mU*mG*mG*mAmAmUmAmGmUmA | | | | |
| | | | mUmAmAmCmAmAmUmAmUmGmCmUmA | | | | |
| | | | mAmAmUmGmUmUmGmUmUmAmUmAmG | | | | |
| | | | mUmAmUmCmCmCmAmC- | | | | |
| | | | mGmCmAmCmAmGdIdIdImAmGmAmU | | | | |
| | | | mA*mG*mA*mA*mG-3′ | | | | |

[symbol]

indicates data missing or illegible when filed

[0458] Mismatches outside of the triplet were generally well tolerated and allowed to improve the editing activity. Relative to the editing observed for a guide oligonucleotide that is fully 2′-OMe modified with a DNA triplet, generally editing was observed to be higher for guide oligonucleotides comprising a FANA triplet.

### Example 2. Reversing an Amino Acid Substitution Mutation R294X in the MECP2 Transcript by Targeted a to I Editing

[0459] Guide oligonucleotides were chemically synthesized as previously described in Example 1.

[0460] Human ADAR2 sequence (NM_001112.4; SEQ ID NO: 55), human ADAR1p110 (NM_001111.5; SEQ ID NO: 56) and human MECP2 R294X (NM_004992; SEQ ID NO: 59) sequences (ORF only), were cloned into pcDNA3.1 plasmid under the control of the CMV promoter using BamHI and XbaI restriction sites (Quintara Bio, Berkeley, Calif.) and the correct insert was sequence verified. For the human MECP2 R294X construct, recombinant HA-tag is placed in-frame at the N-terminus of the coding sequence. The plasmids will henceforth be denoted as ADAR2/pcDNA3.1, ADAR1p110/pcDNA3.1, or MECP2/pcDNA3.1. Editing experiments were performed as previously described in Example 1.

TABLE 6
Primers Used for RT-PCR

| | | SEQ |
|---|---|---|
| Name | Sequence (5′ to 3′) | ID NO. |
| MECP2 | AGAAAAGTCCTGGGAAGCTC | 99 |
| R294X Forward | | |
| MECP2 | GGACTCTGAGTGGTGGTGAT | 100 |
| R294X Reverse | | |

[0461] ADAR mediated editing of exemplary modified guide oligonucleotides targeting human MECP2 R294X are described in Table 5.

[0462] Abbreviations of various modifications are shown in the table below. For example, A, C, G and U are ribonucleosides; dA, dC, dG and dT are deoxyribonucleosides; mA, mC, mG and mU are 2′-O-methyl ribonucleosides; fA, fC, fG and fU are 2′-fluoroarabinonucleosides (FANA). The DNA triplet (dTdCdG) and the FANA triplet (fUfCfG) are indicated in bold. Mismatches are indicated in bold and underline. GluR refers to the natural ADAR substrate, GluR2 receptor pre-mRNA or longer RNA sequences that form a hairpin structure similar to GluR2.

| Modification | Abbreviation |
|---|---|
| RNA | rN |
| DNA | dN |
| 2′-O-Methyl(2′-OMe) | mN |
| 2′-F-arabinose (FANA) | fN |
| 2′-F-RNA | FN |
| 2′-O-Methoxyethyl (MOE) | MN |
| Locked Nucleic Acids (LNA) | LN |
| Abasic | dS |
| RNA-Abasic | rs |
| 2′-OMe-Abasic | mS |
| 5-Methyl-rC | rmC |
| 5-Methyl-dC | dmC |
| 5-Methyl-2′-OMe-C | mmC |
| (S)-Glycol Nucleic Acid (S-GNA) | sgN |
| (R)-Glycol Nucleic Acid (R-GNA) | rgN |
| DNA α-anomer | αN |
| Arabinose | aN |
| 2′-OMe-Arabinose | amN |
| Flexible Nucleic Acid (FNA) | fxN |
| Serineol Nucleic Acid | sN |
| β-D-homoDNA | hdN |
| β-D-HNA | hN |
| Phosphorothioate internucleoside linkage | * |

TABLE 7
Guide Oligonucleotides Targeting Human MECP2 (R294X)

| | | | | | | ADAR1 | ADAR1 |
|---|---|---|---|---|---|---|---|
| SEQ | | | | ADAR | ADAR2 | p1110 | p110 |
| ID | Oligo | | | 2% | St. | % | St. |
| NO. | ID | Length | Guide RNA Sequences | editing | Dev. | Editing | Dev. |
| | | | Human MeCP2 R294X- | | | | |
| | | | GluR-gRNA | | | | |
| | | | (R294X → [symbol] ) | | | | |
| 83 | KB- | 63 | 5′- | 0.0 | 0.0 | 0 | 0 |
| | 021- | | mG*mU*mG*mG*mAmAmUmAmGmUmAmU | | | | |
| | 265 | | mAmAmCmAmAmUmAmUmGmCmUmAmAmA | | | | |
| | | | mUmGmUmUmGmUmUmAmUmAmGmUmAmU | | | | |
| | | | mCmCmCmAmC- | | | | |
| | | | mGmCmAmCmAmGdAdCdCmAmGmAmU | | | | |
| | | | mA*mG*mA*mA*mG-3′ | | | | |
| 84 | KB- | 65 | 5′- | 14.8663102* | 0.0 | 0 | 0 |
| | 021- | | mG*mU*mG*mG*mAmAmGmAmGmUmAmU | | | | |
| | 266 | | mAmAmCmAmAmUmAmUmGmCmUmAmAmA | | | | |
| | | | mUmGmUmUmGmUmUmAmUmAmGmUmAmU | | | | |
| | | | mCmCmCmAmC- | | | | |
| | | | mCmCmAmCmAmGdAdCdCmAmGmAmUmA | | | | |
| | | | mGmA*mA*mG*mA*mC-3′ | | | | |
| 85 | KB- | 63 | 5′- | 0.0 | 0.0 | 0 | 0 |
| | 021- | | mG*mG*mU*mG*mAmAmGmAmGmGmAmG | | | | |
| | 267 | | mAmAmCmAmAmUmAmUmGmCmUmAmAmA | | | | |
| | | | mUmGmUmUmGmUmUmCmUmCmGmUmCmU | | | | |
| | | | mCmCmAmCmC- | | | | |
| | | | mGmCmAmCmAmGdAdCdCmAmGmAmU | | | | |
| | | | mA*mG*mA*mA*mG-3′ | | | | |
| 86 | KB- | 73 | 5′- | 0.0 | 0.0 | 0 | 0 |
| | 021- | | mG*mG*mU*mG*mUmCmGmAmGmAmAmG | | | | |
| | 268 | | mAmGmGmAmGmAmAmCmAmAmUmAmUmG | | | | |
| | | | mCmUmAmAmAmUmGmUmUmGmUmUmCmU | | | | |
| | | | mCmGmUmCmUmCmCmUmCmGmAmCmAmC | | | | |
| | | | mC- | | | | |
| | | | mGmCmAmCmAmGdAdCdCmAmGmAmU | | | | |
| | | | mA*mG*mA*mA*mG-3′ | | | | |
| | | | Human MeCP2 R294X- | | | | |
| | | | Antisense-gRNA | | | | |
| | | | (R294X → [symbol] ) | | | | |
| 87 | KB- | 50 | 5′- | 0.0 | 0.0 | 13.4 | 0.8 |
| | 021- | | mG*mC*mG*mC*mUmUmCmUmUmGmAmU | | | | |
| | 269 | | mGmGmGmGmAmGmUmAmCmGmGmUmCmU | | | | |
| | | | mCmCmUmGmCmAmCmAmGdAdCdCmAmG | | | | |
| | | | mAmUmAmGmAmA*mG*mA*mC*mU-3′ | | | | |
| 88 | KB- | 50 | 5′- | 0.0 | 0.0 | 0.0 | 0.0 |
| | 021- | | mG*mC*mG*mC*mUmUmCmUmUmGmAmU | | | | |
| | 270 | | mGmGmGmGmAmGmUmAmGmGmGmUmGmU | | | | |
| | | | mCmCmUmGmCmAmCmAmGdAdCdCmAmG | | | | |
| | | | mAmUmAmGmAmA*mG*mA*mC*mU-3′ | | | | |
| 89 | KB- | 50 | 5′- | 0.0 | 0.0 | 12.6626193* | 0.0 |
| | 021- | | mG*mC*mG*mC*mUmUmCmUmUmGmAmU | | | | |
| | 271 | | mGmGmGmGmAmGmUmCmCmGmGmCmCmU | | | | |
| | | | mCmCmUmGmCmAmCmAmGdAdCdCmAmG | | | | |
| | | | mAmUmAmGmAmA*mG*mA*mC*mU-3′ | | | | |
| 90 | KB- | 50 | 5′- | 0.0 | 0.0 | 0.0 | 0.0 |
| | 021- | | mG*mC*mG*mC*mUmUmCmUmUmGmAmU | | | | |
| | 272 | | mGmGmGmGmAmAmUmAmCmAmGmUmCmU | | | | |
| | | | mCmCmUmGmCmAmCmAmGdAdCdCmAmG | | | | |
| | | | mAmUmAmGmAmA*mG*mA*mC*mU-3′ | | | | |
| 91 | KB- | 50 | 5′- | 11.6144019* | 0.0 | 9.3 | 1.4 |
| | 021- | | mG*mC*mG*mC*mUmUmCmUmUmGmAmU | | | | |
| | 273 | | mGmGmGmAmAmGmUmCmCmGmGmUmCmU | | | | |
| | | | mCmCmUmGmCmAmCmAmGdAdCdCmAmG | | | | |
| | | | mAmUmAmGmAmA*mG*mA*mC*mU-3′ | | | | |
| 92 | KB- | 50 | 5′ | 0.0 | 0.0 | 10.4029991* | 0.0 |
| | 021- | | mG*mC*mG*mC*mUmUmCmUmUmGmAmU | | | | |
| | 274 | | mGmGmAmGmAmGmCmAmCmGmGmUmCmU | | | | |
| | | | mCmCmUmGmCmAmCmAmGdAdCdCmAmG | | | | |
| | | | mAmUmAmGmAmA*mG*mA*mC*mU-3′ | | | | |
| 93 | KB- | 50 | 5′- | 13.6 | 11.9 | 15.4 | 1.7 |
| | 021- | | mG*mC*mG*mC*mUmUmCmUmUmGmAmU | | | | |
| | 275 | | mGmGmGmAmAmGmUmCmCmGmGmUmCmU | | | | |
| | | | mCmCmUmGmCmAmCmAmG [symbol] dCdCmAmG | | | | |
| | | | mAmUmAmGmAmA*mG*mA*mC*mU-3′ | | | | |
| 94 | KB- | 50 | 5′- | 21.4 | 3.3 | 16.2 | 10.9 |
| | 021- | | mG*mC*mG*mC*mUmUmCmUmUmGmAmU | | | | |
| | 276 | | mGmGmGmAmAmGmUmCmCmGmGmUmCmU | | | | |
| | | | mCmCmUmGmCmAmCmAmGdA [symbol] dCmAmG | | | | |
| | | | mAmUmAmGmAmA*mG*mA*mC*mU-3′ | | | | |
| 95 | KB- | 50 | 5′- | 17.4 | 3.5 | 0.0 | 0.0 |
| | 021- | | mG*mC*mG*mC*mUmUmCmUmUmGmAmU | | | | |
| | 277 | | mGmGmGmAmAmGmUmCmCmGmGmUmCmU | | | | |
| | | | mCmCmUmGmCmAmCmAmGdAdC [symbol] mAmG | | | | |
| | | | mAmUmAmGmAmA*mG*mA*mC*mU-3′ | | | | |
| 96 | KB- | 50 | 5′- | 18.1 | 3.4 | 9.7 | 8.6 |
| | 021- | | mG*mC*mG*mC*mUmUmCmUmUmGmAmU | | | | |
| | 278 | | mGmGmGmAmAmGmUmCmCmGmGmUmCmU | | | | |
| | | | mCmCmUmGmCmAmCmAmG [symbol] mAmG | | | | |
| | | | mAmUmAmGmAmA*mG*mA*mC*mU-3′ | | | | |
| 97 | KB- | 50 | 5′- | 11.2 | 1.5 | 21.8 | 5.7 |
| | 021- | | mG*mC*mG*mC*mUmUmCmUmUmGmAmU | | | | |
| | 279 | | mGmGmGmAmAmGmUmCmCmGmGmUmCmU | | | | |
| | | | mCmCmUmGmCmAmCmAmGdA [symbol] mAmG | | | | |
| | | | mAmUmAmGmAmA*mG*mA*mC*mU-3′ | | | | |
| 98 | KB- | 50 | 5′- | 9.4 | 13.2 | 18.2237601* | 0.0 |
| | 021- | | mG*mC*mG*mC*mUmUmCmUmUmGmAmU | | | | |
| | 280 | | mGmGmGmAmAmGmUmCmCmGmGmUmCmU | | | | |
| | | | mCmCmUmGmCmAmCmAmG [symbol] dCmAmG | | | | |
| | | | mAmUmAmGmAmA*mG*mA*mC*mU-3′ | | | | |
| | | | Human MeCP2 R294X- | | | | |
| | | | Antisense-gRNA | | | | |
| | | | (R294X → [symbol] ) | | | | |
| 66 | | 50 | 5′- | | | | |
| | | | mU*mU*mU*mC*mUmUmGmCmGmAmAmU | | | | |
| | | | mGmGmCmCmUmGmAmGmGmGmUmCmGmG | | | | |
| | | | mCmCmUmCmAmGmCmUmUdTdCdCmAmC | | | | |
| | | | mUmUmCmCmUmG*mC*mC*mG*mG-3′ | | | | |
| 76 | | 50 | 5′- | | | | |
| | | | mU*mU*mU*mC*mUmUmGmGmGmAmAmU | | | | |
| | | | mGmGmCmCmUmGmAmGmGmGmUmCmGmG | | | | |
| | | | mCmCmUmCmAmGmCmUmU [symbol] dCdCmAmC | | | | |
| | | | mUmUmCmCmUmG*mC*mC*mG*mG-3′ | | | | |
| 77 | | 50 | 5′- | | | | |
| | | | mU*mU*mU*mC*mUmUmGmGmGmAmAmU | | | | |
| | | | mGmGmCmCmUmGmAmGmGmGmUmCmGmG | | | | |
| | | | mCmCmUmCmAmGmCmUmUdT [symbol] dCmAmC | | | | |
| | | | mUmUmCmCmUmG*mC*mC*mG*mG-3′ | | | | |
| 78 | | 50 | 5′- | | | | |
| | | | mU*mU*mU*mC*mUmUmGmGmGmAmAmU | | | | |
| | | | mGmGmCmCmUmGmAmGmGmGmUmCmGmG | | | | |
| | | | mCmCmUmCmAmGmCmUmUdTdC [symbol] mAmC | | | | |
| | | | mUmUmCmCmUmG*mC*mC*mG*mG-3′ | | | | |
| 80 | | 50 | 5′- | | | | |
| | | | mU*mU*mU*mC*mUmUmGmGmGmAmAmU | | | | |
| | | | mGmGmCmCmUmGmAmCmGmGmUmCmGmG | | | | |
| | | | mCmCmUmCmAmGmCmUmUdT [symbol] mAmC | | | | |
| | | | mUmUmCmCmUmG*mC*mC*mG*mG-3′ | | | | |
| 81 | | 50 | 5′- | | | | |
| | | | mU*mU*mU*mC*mUmUmGmGmGmAmAmU | | | | |
| | | | mGmGmCmCmUmGmAmGmGmGmUmCmGmG | | | | |
| | | | mCmCmUmCmAmGmCmUmU [symbol] dCmAmC | | | | |
| | | | mUmUmCmCmUmG*mC*mC*mG*mG-3′ | | | | |
| 79 | | 50 | 5′- | | | | |
| | | | mU*mU*mU*mC*mUmUmGmGmGmAmAmU | | | | |
| | | | mGmGmCmCmUmGmAmGmGmGmUmCmGmG | | | | |
| | | | mCmCmUmCmAmGmCmUm [symbol] mAmC | | | | |
| | | | mUmUmCmCmUmG*mC*mC*mG*mG-3′ | | | | |
| 179 | | 50 | 5′- | | | | |
| | | | mU*mU*mU*mC*mUmUmGmGmGmAmAmU | | | | |
| | | | mGmGmCmCmUmGmAmGmGmGmUmCmGmG | | | | |
| | | | mCmCmUmCmAmGmCmUmU [symbol] dCdCmAmC | | | | |
| | | | mUmUmCmCmUmG*mC*mC*mG*mG-3′ | | | | |
| 180 | | 50 | 5′- | | | | |
| | | | mU*mU*mU*mC*mUmUmGmGmGmAmAmU | | | | |
| | | | mGmGmCmCmUmGmAmGmGmGmUmCmGmG | | | | |
| | | | mCmCmUmCmAmGmCmUmUdT [symbol] dCmAmC | | | | |
| | | | mUmUmCmCmUmG*mC*mC*mG*mG-3′ | | | | |
| 181 | | 50 | 5′- | | | | |
| | | | mU*mU*mU*mC*mUmUmGmGmGmAmAmU | | | | |
| | | | mGmGmCmCmUmGmAmGmGmGmUmCmGmG | | | | |
| | | | mCmCmUmCmAmGmCmUmUdTdCaCmAmC | | | | |
| | | | mUmUmCmCmUmG*mC*mC*mG*mG-3′ | | | | |
| 182 | | 50 | 5′- | | | | |
| | | | mU*mU*mU*mC*mUmUmGmGmGmAmAmU | | | | |
| | | | mGmGmCmCmUmGmAmGmGmGmUmCmGmG | | | | |
| | | | mCmCmUmCmAmGmCmUmUaUaCaCmAmC | | | | |
| | | | mUmUmCmCmUmG*mC*mC*mG*mG-3′ | | | | |
| 183 | | 50 | 5′- | | | | |
| | | | mU*mU*mU*mC*mUmUmGmGmGmAmAmU | | | | |
| | | | mGmGmCmCmUmGmAmGmGmGmUmCmGmG | | | | |
| | | | mCmCmUmCmAmGmCmUmUamUdCdCmAmC | | | | |
| | | | mUmUmCmCmUmG*mC*mC*mG*mG-3′ | | | | |
| 184 | | 50 | 5′- | | | | |
| | | | mU*mU*mU*mC*mUmUmGmGmGmAmAmU | | | | |
| | | | mGmGmCmCmUmGmAmGmGmGmUmCmGmG | | | | |
| | | | mCmCmUmCmAmGmCmUmUdTamCdCmAmC | | | | |
| | | | mUmUmCmCmUmG*mC*mC*mG*mG-3′ | | | | |
| 185 | | 50 | 5′- | | | | |
| | | | mU*mU*mU*mC*mUmUmGmGmGmAmAmU | | | | |
| | | | mGmGmCmCmUmGmAmGmGmGmUmCmGmG | | | | |
| | | | mCmCmUmCmAmGmCmUmUdTdCamCmAmC | | | | |
| | | | mUmUmCmCmUmG*mC*mC*mG*mG-3′ | | | | |
| 186 | | 50 | 5′- | | | | |
| | | | mU*mU*mU*mC*mUmUmGmGmGmAmAmU | | | | |
| | | | mGmGmCmCmUmGmAmGmGmGmUmCmGmG | | | | |
| | | | mCmCmUmCmAmGmCmUmUdT [symbol] dCmAmC | | | | |
| | | | mUmUmCmCmUmG*mC*mC*mG*mG-3′ | | | | |
| 187 | | 50 | 5′- | | | | |
| | | | mU*mU*mU*mC*mUmUmGmGmGmAmAmU | | | | |
| | | | mGmGmCmCmUmGmAmGmGmGmUmCmGmG | | | | |
| | | | mCmCmUmCmAmGmCmUmUdTdSdCmAmC | | | | |
| | | | mUmUmCmCmUmG*mC*mC*mG*mG-3′ | | | | |
| 188 | | 50 | 5′- | | | | |
| | | | mU*mU*mU*mC*mUmUmGmGmGmAmAmU | | | | |
| | | | mGmGmCmCmUmGmAmGmGmGmUmCmGmG | | | | |
| | | | mCmCmUmCmAmGmCmUmUdTrSdCmAmC | | | | |
| | | | mUmUmCmCmUmG*mC*mC*mG*mG-3′ | | | | |
| 189 | | 50 | 5′- | | | | |
| | | | mU*mU*mU*mC*mUmUmGmGmGmAmAmU | | | | |
| | | | mGmGmCmCmUmGmAmGmGmGmUmCmGmG | | | | |
| | | | mCmCmUmCmAmGmCmUmUdT [symbol] dCmAmC | | | | |
| | | | mUmUmCmCmUmG*mC*mC*mG*mG-3′ | | | | |
| 190 | | 50 | 5′- | | | | |
| | | | mU*mU*mU*mC*mUmUmGmGmGmAmAmU | | | | |
| | | | mGmGmCmCmUmGmAmGmGmGmUmCmGmG | | | | |
| | | | mCmCmUmCmAmGmCmUmUsgTdCdCmAmC | | | | |
| | | | mUmUmCmCmUmG*mC*mC*mG*mG-3′ | | | | |
| 191 | | 50 | 5′- | | | | |
| | | | mU*mU*mU*mC*mUmUmGmGmGmAmAmU | | | | |
| | | | mGmGmCmCmUmGmAmGmGmGmUmCmGmG | | | | |
| | | | mCmCmUmCmAmGmCmUmUdTsgCdCmAmC | | | | |
| | | | mUmUmCmCmUmG*mC*mC*mG*mG-3′ | | | | |
| 192 | | 50 | 5′- | | | | |
| | | | mU*mU*mU*mC*mUmUmGmGmGmAmAmU | | | | |
| | | | mGmGmCmCmUmGmAmGmGmGmUmCmGmG | | | | |
| | | | mCmCmUmCmAmGmCmUmUsgTsgCdCmA | | | | |
| | | | mCmUmUmCmCmUmG*mC*mC*mG*mG-3′ | | | | |
| 193 | | 50 | 5′- | | | | |
| | | | mU*mU*mU*mC*mUmUmCmGmGmAmAmU | | | | |
| | | | mGmGmCmCmUmGmAmGmGmGmUmCmGmG | | | | |
| | | | mCmCmUmCmAmGmCmUmUrgTdCdCmAmC | | | | |
| | | | mUmUmCmCmUmG*mC*mC*mG*mG-3′ | | | | |
| 194 | | 50 | 5′- | | | | |
| | | | mU*mU*mU*mC*mUmUmGmGmGmAmAmU | | | | |
| | | | mGmGmCmCmUmGmAmGmGmGmUmCmGmG | | | | |
| | | | mCmCmUmCmAmGmCmUmUdTrgCdCmAmC | | | | |
| | | | mUmUmCmCmUmG*mC*mC*mG*mG-3′ | | | | |
| 195 | | 50 | 5′- | | | | |
| | | | mU*mU*mU*mC*mUmUmGmGmGmAmAmU | | | | |
| | | | mGmGmCmCmUmGmAmGmGmGmUmCmGmG | | | | |
| | | | mCmCmUmCmAmGmCmUmUdTdCrgCmAmC | | | | |
| | | | mUmUmCmCmUmG*mC*mC*mG*mG-3′ | | | | |
| 196 | | 50 | 5′- | | | | |
| | | | mU*mU*mU*mC*mUmUmGmGmGmAmAmU | | | | |
| | | | mGmGmCmCmUmGmAmGmGmGmUmCmGmG | | | | |
| | | | mCmCmUmCmAmGmCmUmU [symbol] dCdCmAmC | | | | |
| | | | mUmUmCmCmUmG*mC*mC*mG*mG-3′ | | | | |
| 197 | | 50 | 5′- | | | | |
| | | | mU*mU*mU*mC*mUmUmGmGmGmAmAmU | | | | |
| | | | mGmGmCmCmUmGmAmGmGmGmUmCmGmG | | | | |
| | | | mCmCmUmCmAmGmCmUmUdT [symbol] dCmAmC | | | | |
| | | | mUmUmCmCmUmG*mC*mC*mG*mG-3′ | | | | |
| 198 | | 50 | 5′- | | | | |
| | | | mU*mU*mU*mC*mUmUmGmGmGmAmAmU | | | | |
| | | | mGmGmCmCmUmGmAmGmGmGmUmCmGmG | | | | |
| | | | mCmCmUmCmAmGmCmUmUdTdC [symbol] mAmCm | | | | |
| | | | UmUmCmCmUmG*mC*mC*mG*mG-3′ | | | | |
| 199 | | 50 | 5′- | | | | |
| | | | mU*mU*mU*mC*mUmUmGmGmGmAmAmU | | | | |
| | | | mGmGmCmCmUmGmAmGmGmGmUmCmGmG | | | | |
| | | | mCmCmUmCmAmGmCmUmU [symbol] dCdCmAmC | | | | |
| | | | mUmUmCmCmUmG*mC*mC*mG*mG-3′ | | | | |
| 200 | | 50 | 5′- | | | | |
| | | | mUmUmUmC*mUmUmGmGmGmAmAmUm | | | | |
| | | | GmGmCmCmUmGmAmGmGmGmUmCmGmG | | | | |
| | | | mCmCmUmCmAmGmCmUmUdT [symbol] dCmAmC | | | | |
| | | | mUmUmCmCmUmG*mC*mC*mG*mG-3′ | | | | |
| 201 | | 50 | 5′- | | | | |
| | | | mU*mU*mU*mC*mUmUmGmGmGmAmAmU | | | | |
| | | | mGmGmCmCmUmGmAmGmGmGmUmCmGmG | | | | |
| | | | mCmCmUmCmAmGmCmUmUdTdC [symbol] mAmC | | | | |
| | | | mUmUmCmCmUmG*mC*mC*mG*mG-3′ | | | | |
| 202 | | 50 | 5′- | | | | |
| | | | mU*mU*mU*mC*mUmUmGmGmGmAmAmU | | | | |
| | | | mGmGmCmCmUmGmAmGmGmGmUmCmGmG | | | | |
| | | | mCmCmUmCmAmGmCmUmU [symbol] dCdCmAmC | | | | |
| | | | mUmUmCmCmUmG*mC*mC*mG*mG-3′ | | | | |
| 203 | | 50 | 5′- | | | | |
| | | | mU*mU*mU*mC*mUmUmGmGmGmAmAmU | | | | |
| | | | mGmGmCmCmUmGmAmGmGmGmUmCmGmG | | | | |
| | | | mCmCmUmCmAmGmCmUmUdT [symbol] dCmAmC | | | | |
| | | | mUmUmCmCmUmG*mC*mC*mG*mG-3′ | | | | |
| 204 | | 50 | 5′- | | | | |
| | | | mU*mU*mU*mC*mUmUmGmGmGmAmAmU | | | | |
| | | | mGmGmCmCmUmGmAmGmGmGmUmCmGmG | | | | |
| | | | mCmCmUmCmAmGmCmUmUdTdC [symbol] mAmC | | | | |
| | | | mUmUmCmCmUmG*mC*mC*mG*mG-3′ | | | | |
| 205 | | 50 | 5′- | | | | |
| | | | mU*mU*mU*mC*mUmUmCmGmGmAmAmU | | | | |
| | | | mGmGmCmCmUmGmAmGmGmGmUmCmGmG | | | | |
| | | | mCmCmUmCmAmGmCmUmUdIdCdCmAmC | | | | |
| | | | mUmUmCmCmUmG*mC*mC*mG*mG-3′ | | | | |
| 206 | | 50 | 5′- | | | | |
| | | | mU*mU*mU*mC*mUmUmGmGmGmAmAmU | | | | |
| | | | mGmGmCmCmUmGmAmGmGmGmUmCmGmG | | | | |
| | | | mCmCmUmCmAmGmCmUmUdTdIdCmAmC | | | | |
| | | | mUmUmCmCmUmG*mC*mC*mG*mG-3′ | | | | |
| 207 | | 50 | 5′- | | | | |
| | | | mU*mU*mU*mC*mUmUmGmGmGmAmAmU | | | | |
| | | | mGmGmCmCmUmGmAmGmGmGmUmCmGmG | | | | |
| | | | mCmCmUmCmAmGmCmUmUdTdCdImAmC | | | | |
| | | | mUmUmCmCmUmG*mC*mC*mG*mG-3′ | | | | |
| 208 | | 50 | 5′- | | | | |
| | | | mU*mU*mU*mC*mUmUmGmGmGmAmAmU | | | | |
| | | | mGmGmCmCmUmGmAmGmGmGmUmCmGmG | | | | |
| | | | mCmCmUmCmAmGmCmUmUdIdIdCmAmC | | | | |
| | | | mUmUmCmCmUmG*mC*mC*mG*mG-3′ | | | | |
| 209 | | 50 | 5′- | | | | |
| | | | mU*mU*mU*mC*mUmUmGmGmGmAmAmU | | | | |
| | | | mGmGmCmCmUmGmAmGmGmGmUmCmGmG | | | | |
| | | | mCmCmUmCmAmGmCmUmUdTdIdImAmC | | | | |
| | | | mUmUmCmCmUmG*mCmC*mG*mG-3′ | | | | |
| 210 | | 50 | 5′- | | | | |
| | | | mU*mU*mU*mC*mUmUmGmGmGmAmAmU | | | | |
| | | | mGmGmCmCmUmGmAmGmGmGmUmCmGmG | | | | |
| | | | mCmCmUmCmAmGmCmUmUdIdCdImAmC | | | | |
| | | | mUmUmCmCmUmG*mC*mC*mG*mG-3′ | | | | |
| 211 | | 50 | 5′- | | | | |
| | | | mU*mU*mU*mC*mUmUmGmGmGmAmAmU | | | | |
| | | | mGmGmCmCmUmGmAmGmGmGmUmCmGmG | | | | |
| | | | mCmCmUmCmAmGmCmUmUdIdIdImAmC | | | | |
| | | | mUmUmCmCmUmG*mC*mC*mG*mG-3′ | | | | |
| | | | Human MeCP2 R294X- | | | | |
| | | | GluR-gRNA | | | | |
| | | | (R294X → [symbol] ) | | | | |
| 62 | | 63 | 5′- | | | | |
| | | (45 + 18) | mG*mU*mG*mG*mAmAmUmAmGmUmAmU | | | | |
| | | | mAmAmCmAmAmUmAmUmGmCmUmAmAmA | | | | |
| | | | mUmGmUmUmGmUmUmAmUmAmGmUmAmU | | | | |
| | | | mCmCmCmAmC- | | | | |
| | | | mCmAmGmCmUmUdTdCdCmAmCmUmU | | | | |
| | | | mC*mC*mU*mG*mC-3′ | | | | |
| 212 | | 63 | 5′- | | | | |
| | | (45 + 18) | mG*mU*mG*mG*mAmAmUmAmGmUmAmU | | | | |
| | | | mAmAmCmAmAmUmAmUmGmCmUmAmAmA | | | | |
| | | | mUmGmUmUmGmUmUmAmUmAmGmUmAmU | | | | |
| | | | mCmCmCmAmC- | | | | |
| | | | mCmAmGmCmUmU [symbol] dCdCmAmCmUmU | | | | |
| | | | mC*mC*mU*mG*mC-3′ | | | | |
| 213 | | 63 | 5′- | | | | |
| | | (45 + 18) | mG*mU*mG*mG*mAmAmUmAmGmUmAmU | | | | |
| | | | mAmAmCmAmAmUmAmUmGmCmUmAmAmA | | | | |
| | | | mUmGmUmUmGmUmUmAmUmAmGmUmAmU | | | | |
| | | | mCmCmCmAmC- | | | | |
| | | | mCmAmGmCmUmUdT [symbol] dCmAmCmUmU | | | | |
| | | | mC*mC*mU*mG*mC-3′ | | | | |
| 214 | | 63 | 5′- | | | | |
| | | (45 + 18) | mG*mU*mG*mG*mAmAmUmAmGmUmAmU | | | | |
| | | | mAmAmCmAmAmUmAmUmGmCmUmAmAmA | | | | |
| | | | mUmGmUmUmGmUmUmAmUmAmGmUmAmU | | | | |
| | | | mCmCmCmAmC- | | | | |
| | | | mCmAmGmCmUmUdTdC [symbol] mAmCmUmU | | | | |
| | | | mC*mC*mU*mG*mC-3′ | | | | |
| 215 | | 63 | 5′- | | | | |
| | | (45 + 18) | mG*mU*mG*mG*mAmAmUmAmGmUmAmU | | | | |
| | | | mAmAmCmAmAmUmAmUmGmCmUmAmAmA | | | | |
| | | | mUmGmUmUmGmUmUmAmUmAmGmUmAmU | | | | |
| | | | mCmCmCmAmC- | | | | |
| | | | mCmAmGmCmUmUdT [symbol] mAmCmUmU | | | | |
| | | | mC*mC*mU*mG*mC-3′ | | | | |
| 216 | | 63 | 5′- | | | | |
| | | (45 + 18) | mC*mU*mG*mG*mAmAmUmAmCmUnAmU | | | | |
| | | | mAmAmCmAmAmUmAmUmGmCmUmAmAmA | | | | |
| | | | mUmGmUmUmGmUmUmAmUmAmGmUmAmU | | | | |
| | | | mCmCmCmAmC- | | | | |
| | | | mCmAmGmCmUmU [symbol] dCmAmCmUmU | | | | |
| | | | mC*mC*mU*mG*mC-3′ | | | | |
| 217 | | 63 | 5′- | | | | |
| | | (45 + 18) | mC*mU*mG*mG*mAmAmUmAmCmUnAmU | | | | |
| | | | mAmAmCmAmAmUmAmUmGmCmUmAmAmA | | | | |
| | | | mUmGmUmUmGmUmUmAmUmAmGmUmAmU | | | | |
| | | | mCmCmCmAmC- | | | | |
| | | | mCmAmGmCmUmU [symbol] mAmCmUmU | | | | |
| | | | mC*mC*mU*mG*mC-3′ | | | | |
| 218 | | 63 | 5′- | | | | |
| | | (45 + 18) | mG*mU*mG*mG*mAmAmUmAmGmUmAmU | | | | |
| | | | mAmAmCmAmAmUmAmUmGmCmUmAmAmA | | | | |
| | | | mUmGmUmUmCmUmUmAmUmAmGmUmAmU | | | | |
| | | | mCmCmCmAmC- | | | | |
| | | | mCmAmGmCmUmU [symbol] dCdCmAmCmUmU | | | | |
| | | | mC*mC*mU*mG*mC-3′ | | | | |
| 219 | | 63 | 5′- | | | | |
| | | (45 + 18) | mG*mU*mG*mG*mAmAmUmAmGmUmAmU | | | | |
| | | | mAmAmCmAmAmUmAmUmGmCmUmAmAmA | | | | |
| | | | mUmGmUmUmGmUmUmAmUmAmGmUmAmU | | | | |
| | | | mCmCmCmAmC- | | | | |
| | | | mCmAmGmCmUmUdT [symbol] dCmAmCmUmU | | | | |
| | | | mC*mC*mU*mG*mC-3′ | | | | |
| 220 | | 63 | 5′- | | | | |
| | | (45 + 18) | mG*mU*mG*mG*mAmAmUmAmGmUmAmU | | | | |
| | | | mAmAmCmAmAmUmAmUmGmCmUmAmAmA | | | | |
| | | | mUmGmUmUmGmUmUmAmUmAmGmUmAmU | | | | |
| | | | mCmCmCmAmC- | | | | |
| | | | mCmAmGmCmUmUdTdC [symbol] mAmCmUmU | | | | |
| | | | mC*mC*mU*mG*mC-3′ | | | | |
| 221 | | 63 | 5′- | | | | |
| | | (45 + 18) | mG*mU*mG*mG*mAmAmUmAmGmUmAmU | | | | |
| | | | mAmAmCmAmAmUmAmUmGmCmUmAmAmA | | | | |
| | | | mUmGmUmUmGmUmUmAmUmAmGmUmAmU | | | | |
| | | | mCmCmCmAmC- | | | | |
| | | | mCmAmGmCmUmU [symbol] mAmCmUmU | | | | |
| | | | mC*mC*mU*mG*mC-3′ | | | | |
| 222 | | 63 | 5′- | | | | |
| | | (45 + 18) | mG*mU*mG*mG*mAmAmUmAmGmUmAmU | | | | |
| | | | mAmAmCmAmAmUmAmUmGmCmUmAmAmA | | | | |
| | | | mUmGmUmUmGmUmUmAmUmAmGmUmAmU | | | | |
| | | | mCmCmCmAmC- | | | | |
| | | | mCmAmGmCmUmUamUdCdCmAmCmUmU | | | | |
| | | | mC*mC*mU*mG*mC-3′ | | | | |
| 223 | | 63 | 5′- | | | | |
| | | (45 + 18) | mG*mU*mG*mG*mAmAmUmAmGmUmAmU | | | | |
| | | | mAmAmCmAmAmUmAmUmGmCmUmAmAmA | | | | |
| | | | mUmGmUmUmGmUmUmAmUmAmGmUmAmU | | | | |
| | | | mCmCmCmAmC- | | | | |
| | | | mCmAmGmCmUmUdTamCdCmAmCmUmU | | | | |
| | | | mC*mC*mU*mG*mC-3′ | | | | |
| 224 | | 63 | 5′- | | | | |
| | | (45 + 18) | mG*mU*mG*mG*mAmAmUmAmGmUmAmU | | | | |
| | | | mAmAmCmAmAmUmAmUmGmCmUmAmAmA | | | | |
| | | | mUmGmUmUmGmUmUmAmUmAmGmUmAmU | | | | |
| | | | mCmCmCmAmC- | | | | |
| | | | mCmAmGmCmUmUdTdCamCmAmCmUmU | | | | |
| | | | mC*mC*mU*mG*mC-3′ | | | | |
| 225 | | 63 | 5′- | | | | |
| | | (45 + 18) | mG*mU*mG*mG*mAmAmUmAmGmUmAmU | | | | |
| | | | mAmAmCmAmAmUmAmUmGmCmUmAmAmA | | | | |
| | | | mUmGmUmUmGmUmUmAmUmAmGmUmAmU | | | | |
| | | | mCmCmCmAmC- | | | | |
| | | | mCmAmGmCmUmUdT [symbol] dCmAmCmUmU | | | | |
| | | | mC*mC*mU*mG*mC-3′ | | | | |
| 226 | | 63 | 5′- | | | | |
| | | (45 + 18) | mG*mU*mG*mG*mAmAmUmAmGmUmAmU | | | | |
| | | | mAmAmCmAmAmUmAmUmGmCmUmAmAmA | | | | |
| | | | mUmGmUmUmGmUmUmAmUmAmGmUmAmU | | | | |
| | | | mCmCmCmAmC- | | | | |
| | | | mCmAmGmCmUmUdTdSdCmAmCmUmU | | | | |
| | | | mC*mC*mU*mG*mC-3′ | | | | |
| 227 | | 63 | 5′- | | | | |
| | | (45 + 18) | mG*mU*mG*mG*mAmAmUmAmGmUmAmU | | | | |
| | | | mAmAmCmAmAmUmAmUmGmCmUmAmAmA | | | | |
| | | | mUmGmUmUmGmUmUmAmUmAmGmUmAmU | | | | |
| | | | mCmCmCmAmC- | | | | |
| | | | mCmAmGmCmUmUdT [symbol] dCmAmCmUmU | | | | |
| | | | mC*mC*mU*mG*mC-3′ | | | | |
| 228 | | 63 | 5′- | | | | |
| | | (45 + 18) | mG*mU*mG*mG*mAmAmUmAmGmUmAmU | | | | |
| | | | mAmAmCmAmAmUmAmUmGmCmUmAmAmA | | | | |
| | | | mUmGmUmUmGmUmUmAmUmAmGmUmAmU | | | | |
| | | | mCmCmCmAmC- | | | | |
| | | | mCmAmGmCmUmUdT [symbol] dCmAmCmUmU | | | | |
| | | | mC*mC*mU*mG*mC-3′ | | | | |
| 229 | | 63 | 5′- | | | | |
| | | (45 + 18) | mG*mU*mG*mG*mAmAmUmAmGmUmAmU | | | | |
| | | | mAmAmCmAmAmUmAmUmGmCmUmAmAmA | | | | |
| | | | mUmGmUmUmGmUmUmAmUmAmGmUmAmU | | | | |
| | | | mCmCmCmAmC- | | | | |
| | | | mCmAmGmCmUmUsgTdCdCmAmCmUmU | | | | |
| | | | mC*mC*mU*mG*mC-3′ | | | | |
| 230 | | 63 | 5′- | | | | |
| | | (45 + 18) | mG*mU*mG*mG*mAmAmUmAmGmUmAmU | | | | |
| | | | mAmAmCmAmAmUmAmUmCmCmUmAmAmA | | | | |
| | | | mUmGmUmUmGmUmUmAmUmAmGmUmAmU | | | | |
| | | | mCmCmCmAmC- | | | | |
| | | | mCmAmGmCmUmUdTsgCdCmAmCmUmU | | | | |
| | | | mC*mC*mU*mG*mC-3′ | | | | |
| 231 | | 63 | 5′- | | | | |
| | | (45 + 18) | mG*mU*mG*mG*mAmAmUmAmGmUmAmU | | | | |
| | | | mAmAmCmAmAmUmAmUmGmCmUmAmAmA | | | | |
| | | | mUmGmUmUmGmUmUmAmUmAmGmUmAmU | | | | |
| | | | mCmCmCmAmC- | | | | |
| | | | mCmAmGmCmUmUsgTsgCdCmAmCmUmU | | | | |
| | | | mC*mC*mU*mG*mC-3′ | | | | |
| 232 | | 63 | 5′- | | | | |
| | | (45 + 18) | mG*mU*mG*mG*mAmAmUmAmGmUmAmU | | | | |
| | | | mAmAmCmAmAmUmAmUmGmCmUmAmAmA | | | | |
| | | | mUmGmUmUmGmUmUmAmUmAmGmUmAmU | | | | |
| | | | mGmCmCmAmC- | | | | |
| | | | mCmAmGmCmUmUrgTdCdCmAmCmUmU | | | | |
| | | | mC*mC*mU*mG*mC-3′ | | | | |
| 233 | | 63 | 5′- | | | | |
| | | (45 + 18) | mG*mU*mG*mG*mAmAmUmAmGmUmAmU | | | | |
| | | | mAmAmCmAmAmUmAmUmGmCmUmAmAmA | | | | |
| | | | mUmGmUmUmGmUmUmAmUmAmGmUmAmU | | | | |
| | | | mCmCmCmAmC- | | | | |
| | | | mCmAmGmCmUmUdTrgCdCmAmCmUmU | | | | |
| | | | mC*mC*mU*mG*mC-3′ | | | | |
| 234 | | 63 | 5′- | | | | |
| | | (45 + 18) | mG*mU*mG*mG*mAmAmUmAmGmUmAmU | | | | |
| | | | mAmAmCmAmAmUmAmUmGmCmUmAmAmA | | | | |
| | | | mUmGmUmUmGmUmUmAmUmAmGmUmAmU | | | | |
| | | | mCmCmCmAmC- | | | | |
| | | | mCmAmGmCmUmUdTdCrgCmAmCmUmU | | | | |
| | | | mC*mC*mU*mG*mC-3′ | | | | |
| 235 | | 63 | 5′- | | | | |
| | | (45 + 18) | mG*mU*mG*mG*mAmAmUmAmGmUmAmU | | | | |
| | | | mAmAmCmAmAmUmAmUmGmCmUmAmAmA | | | | |
| | | | mUmGmUmUmGmUmUmAmUmAmGmUmAmU | | | | |
| | | | mCmCmCmAmC- | | | | |
| | | | mCmAmGmCmUmU [symbol] dCdCmAmCmUmU | | | | |
| | | | mC*mC*mU*mG*mC-3′ | | | | |
| 236 | | 63 | 5′- | | | | |
| | | (45 + 18) | mG*mU*mG*mG*mAmAmUmAmGmUmAmU | | | | |
| | | | mAmAmCmAmAmUmAmUmGmCmUmAmAmA | | | | |
| | | | mUmGmUmUmGmUmUmAmUmAmGmUmAmU | | | | |
| | | | mCmCmCmAmC- | | | | |
| | | | mCmAmGmCmUmUdT [symbol] dCmAmCmUmU | | | | |
| | | | mC*mC*mU*mG*mC-3′ | | | | |
| 237 | | 63 | 5′- | | | | |
| | | (45 + 18) | mG*mU*mG*mG*mAmAmUmAmGmUmAmU | | | | |
| | | | mAmAmCmAmAmUmAmUmGmCmUmAmAmA | | | | |
| | | | mUmGmUmUmGmUmUmAmUmAmGmUmAmU | | | | |
| | | | mCmCmCmAmC- | | | | |
| | | | mCmAmGmCmUmUdTdC [symbol] mAmCmUmU | | | | |
| | | | mC*mC*mU*mG*mC-3′ | | | | |
| 238 | | 63 | 5′- | | | | |
| | | (45 + 18) | mG*mU*mG*mG*mAmAmUmAmGmUmAmU | | | | |
| | | | mAmAmCmAmAmUmAmUmGmCmUmAmAmA | | | | |
| | | | mUmGmUmUmGmUmUmAmUmAmGmUmAmU | | | | |
| | | | mCmCmCmAmC- | | | | |
| | | | mCmAmGmCmUmU [symbol] dCdCmAmCmUmU | | | | |
| | | | mC*mC*mU*mG*mC-3′ | | | | |
| 239 | | 63 | 5′- | | | | |
| | | (45 + 18) | mG*mU*mG*mG*mAmAmUmAmGmUmAmU | | | | |
| | | | mAmAmCmAmAmUmAmUmGmCmUmAmAmA | | | | |
| | | | mUmGmUmUmGmUmUmAmUmAmGmUmAmU | | | | |
| | | | mCmCmCmAmC- | | | | |
| | | | mCmAmGmCmUmUdT [symbol] dCmAmCmUmU | | | | |
| | | | mC*mC*mU*mG*mC-3′ | | | | |
| 240 | | 63 | 5′- | | | | |
| | | (45 + 18) | mG*mU*mG*mG*mAmAmUmAmGmUmAmU | | | | |
| | | | mAmAmCmAmAmUmAmUmGmCmUmAmAmA | | | | |
| | | | mUmGmUmUmGmUmUmAmUmAmGmUmAmU | | | | |
| | | | mCmCmCmAmC- | | | | |
| | | | mCmAmGmCmUmUdTdC [symbol] mAmCmUmU | | | | |
| | | | mC*mC*mU*mG*mC-3′ | | | | |
| 241 | | 63 | 5′- | | | | |
| | | (45 + 18) | mG*mU*mG*mG*mAmAmUmAmGmUmAmU | | | | |
| | | | mAmAmCmAmAmUmAmUmGmCmUmAmAmA | | | | |
| | | | mUmGmUmUmGmUmUmAmUmAmGmUmAmU | | | | |
| | | | mCmCmCmAmC- | | | | |
| | | | mCmAmGmCmUmU [symbol] dCdCmAmCmUmU | | | | |
| | | | mC*mC*mU*mG*mC-3′ | | | | |
| 242 | | 63 | 5′- | | | | |
| | | (45 + 18) | mG*mU*mG*mG*mAmAmUmAmGmUmAmU | | | | |
| | | | mAmAmCmAmAmUmAmUmGmCmUmAmAmA | | | | |
| | | | mUmGmUmUmGmUmUmAmUmAmGmUmAmU | | | | |
| | | | mCmCmCmAmC- | | | | |
| | | | mCmAmGmCmUmUdT [symbol] dCmAmCmUmU | | | | |
| | | | mC*mC*mU*mG*mC-3′ | | | | |
| 243 | | 63 | 5′- | | | | |
| | | (45 + 18) | mG*mU*mG*mG*mAmAmUmAmGmUmAmU | | | | |
| | | | mAmAmCmAmAmUmAmUmGmCmUmAmAmA | | | | |
| | | | mUmGmUmUmGmUmUmAmUmAmGmUmAmU | | | | |
| | | | mCmCmCmAmC- | | | | |
| | | | mCmAmGmCmUmUdTdC [symbol] mAmCmUmU | | | | |
| | | | mC*mC*mU*mG*mC-3′ | | | | |
| 244 | | 63 | 5′- | | | | |
| | | (45 + 18) | mG*mU*mG*mG*mAmAmUmAmGmUmAmU | | | | |
| | | | mAmAmCmAmAmUmAmUmGmCmUmAmAmA | | | | |
| | | | mUmGmUmUmGmUmUmAmUmAmGmUmAmU | | | | |
| | | | mCmCmCmAmC- | | | | |
| | | | mCmAmGmCmUmUdIdCdCmAmCmUmU | | | | |
| | | | mC*mC*mU*mG*mC-3′ | | | | |
| 245 | | 63 | 5′- | | | | |
| | | (45 + 18) | mG*mU*mG*mG*mAmAmUmAmGmUmAmU | | | | |
| | | | mAmAmCmAmAmUmAmUmGmCmUmAmAmA | | | | |
| | | | mUmGmUmUmGmUmUmAmUmAmGmUmAmU | | | | |
| | | | mCmCmCmAmC- | | | | |
| | | | mCmAmGmCmUmUdTdIdCmAmCmUmU | | | | |
| | | | mC*mC*mU*mG*mC-3′ | | | | |
| 246 | | 63 | 5′- | | | | |
| | | (45 + 18) | mG*mU*mG*mG*mAmAmUmAmGmUmAmU | | | | |
| | | | mAmAmCmAmAmUmAmUmGmCmUmAmAmA | | | | |
| | | | mUmGmUmUmGmUmUmAmUmAmGmUmAmU | | | | |
| | | | mCmCmCmAmC- | | | | |
| | | | mCmAmGmCmUmUdTdCdImAmCmUmU | | | | |
| | | | mC*mC*mU*mG*mC-3′ | | | | |
| 247 | | 63 | 5′- | | | | |
| | | (45 + 18) | mG*mU*mG*mG*mAmAmUmAmGmUmAmU | | | | |
| | | | mAmAmCmAmAmUmAmUmGmCmUmAmAmA | | | | |
| | | | mUmGmUmUmGmUmUmAmUmAmGmUmAmU | | | | |
| | | | mCmCmCmAmC- | | | | |
| | | | mCmAmGmCmUmUdIdIdCmAmCmUmU | | | | |
| | | | mC*mC*mU*mG*mC-3′ | | | | |
| 248 | | 63 | 5′- | | | | |
| | | (45 + 18) | mG*mU*mG*mG*mAmAmUmAmGmUmAmU | | | | |
| | | | mAmAmCmAmAmUmAmUmGmCmUmAmAmA | | | | |
| | | | mUmGmUmUmGmUmUmAmUmAmGmUmAmU | | | | |
| | | | mCmCmCmAmC- | | | | |
| | | | mCmAmGmCmUmUdTdIdImAmCmUmU | | | | |
| | | | mC*mC*mU*mG*mC-3′ | | | | |
| 249 | | 63 | 5′- | | | | |
| | | (45 + 18) | mG*mU*mG*mG*mAmAmUmAmGmUmAmU | | | | |
| | | | mAmAmCmAmAmUmAmUmGmCmUmAmAmA | | | | |
| | | | mUmGmUmUmGmUmUmAmUmAmGmUmAmU | | | | |
| | | | mCmCmCmAmC- | | | | |
| | | | mCmAmGmCmUmUdIdCdImAmCmUmU | | | | |
| | | | mC*mC*mU*mG*mC-3′ | | | | |
| 250 | | 63 | 5′- | | | | |
| | | (45 + 18) | mG*mU*mG*mG*mAmAmUmAmGmUmAmU | | | | |
| | | | mAmAmCmAmAmUmAmUmGmCmUmAmAmA | | | | |
| | | | mUmGmUmUmGmUmUmAmUmAmGmUmAmU | | | | |
| | | | mCmCmCmAmC- | | | | |
| | | | mCmAmGmCmUmUdIdIdImAmCmUmU | | | | |
| | | | mC*mC*mU*mG*mC-3′ | | | | |

[symbol]

indicates data missing or illegible when filed

[0463] Mismatches outside of the triplet were generally well tolerated and allowed to improve the editing activity. Relative to the editing observed for a guide oligonucleotide that is fully 2′-OMe modified with a DNA triplet, generally editing was observed to be higher for guide oligonucleotides comprising a FANA triplet.

### OTHER EMBODIMENTS

[0464] All publications, patents, and patent applications mentioned in this specification are incorporated herein by reference in their entirety to the same extent as if each individual publication, patent, or patent application was specifically and individually indicated to be incorporated by reference in its entirety. Where a term in the present application is found to be defined differently in a document incorporated herein by reference, the definition provided herein is to serve as the definition for the term.

[0465] While the invention has been described in connection with specific embodiments thereof, it will be understood that invention is capable of further modifications and this application is intended to cover any variations, uses, or adaptations of the invention following, in general, the principles of the invention and including such departures from the present disclosure that come within known or customary practice within the art to which the invention pertains and may be applied to the essential features hereinbefore set forth, and follows in the scope of the claims.

INFORMAL SEQUENCE LISTING
SEQ ID NO: 1
GGUGAAUAGUAUAACAAUAU
SEQ ID NO: 2
AUGUUGUUAUAGUAUCCACC
SEQ ID NO: 3
GGUGAAUAGUAUAACAAUAUGCUAAAUGUUGUUAUAGUAUCCACC
SEQ ID NO: 4
GGUGAAGAGGAGAACAAUAU
SEQ ID NO: 5
AUGUUGUUCUCGUCUCCACC
SEQ ID NO: 6
GGUGAAGAGGAGAACAAUAUGCUAAAUGUUGUUCUCGUCUCCACC
SEQ ID NO: 7
GGUGUCGAGAAGAGGAGAACAAUAU
SEQ ID NO: 8
AUGUUGUUCUCGUCUCCUCGACACC
SEQ ID NO: 9
GGUGUCGAGAAGAGGAGAACAAUAUGCUAAAUGUUGUUCUCGUCUCCUCGACACC
SEQ ID NO: 10
GGGUGGAAUAGUAUAACAAUAU
SEQ ID NO: 11
AUGUUGUUAUAGUAUCCCACCU
SEQ ID NO: 12
GGGUGGAAUAGUAUAACAAUAUGCUAAAUGUUGUUAUAGUAUCCCACCU
SEQ ID NO: 13
GUGGAAUAGUAUAACAAUAU
SEQ ID NO: 14
AUGUUGUUAUAGUAUCCCAC
SEQ ID NO: 15
GUGGAAUAGUAUAACAAUAUGCUAAAUGUUGUUAUAGUAUCCCAC
SEQ ID NO: 16
GGUGUCGAGAAUAGUAUAACAAUAU
SEQ ID NO: 17
AUGUUGUUAUAGUAUCCUCGACACC
SEQ ID NO: 18
GGUGUCGAGAAUAGUAUAACAAUAUGCUAAAUGUUGUUAUAGUAUCCUCGACACC
SEQ ID NO: 19
GGGUGGAAUAGUAUAACAAUAU
SEQ ID NO: 20
AUGUUGUUAUAGUAUCCCACCU
SEQ ID NO: 21
GGGUGGAAUAGUAUAACAAUAUGCUAAAUGUUGUUAUAGUAUCCCACCU
SEQ ID NO: 22
GGGUGGAAUAGUAUACCA
SEQ ID NO: 23
UGGUAUAGUAUCCCACCU
SEQ ID NO: 24
GGGUGGAAUAGUAUACCAUUCGUGGUAUAGUAUCCCACCU
SEQ ID NO: 25
GUGGGUGGAAUAGUAUACCA
SEQ ID NO: 26
UGGUAUAGUAUCCCACCUAC
SEQ ID NO: 27
GUGGGUGGAAUAGUAUACCAUUCGUGGUAUAGUAUCCCACCUAC
SEQ ID NO: 28
UGGGUGGAAUAGUAUACCA
SEQ ID NO: 29
UGGUAUAGUAUCCCACCUA
SEQ ID NO: 30
UGGGUGGAAUAGUAUACCAUUCGUGGUAUAGUAUCCCACCUA
SEQ ID NO: 31
GGUGGAAUAGUAUACCA
SEQ ID NO: 32
UGGUAUAGUAUCCCACC
SEQ ID NO: 33
GGUGGAAUAGUAUACCAUUCGUGGUAUAGUAUCCCACC
SEQ ID NO: 34
GUGGAAUAGUAUACCA
SEQ ID NO: 35
UGGUAUAGUAUCCCAC
SEQ ID NO: 36
GUGGAAUAGUAUACCAUUCGUGGUAUAGUAUCCCAC
SEQ ID NO: 37
GGUGAAUAGUAUAACAAUAUGCUAAAUGUUGUUAUAGUAUCCACC
SEQ ID NO: 38
GGUGAAGAGGAGAACAAUAUGCUAAAUGUUGUUCUCGUCUCCACC
SEQ ID NO: 39
GGUGUCGAGAAGAGGAGAACAAUAUGCUAAAUGUUGUUCUCGUCUCCUCGACACC
SEQ ID NO: 40
*s*s*G**GAGAAGAGGAGAA*AA*A*G**AAA*G**G*****G*******GA*A**
SEQ ID NO: 41
GGGUGGAAUAGUAUAACAAUAUGCUAAAUGUUGUUAUAGUAUCCCACCU
SEQ ID NO: 42
GUGGAAUAGUAUAACAAUAUGCUAAAUGUUGUUAUAGUAUCCCAC
SEQ ID NO: 43
GGUGUCGAGAAUAGUAUAACAAUAUGCUAAAUGUUGUUAUAGUAUCCUCGACACC
SEQ ID NO: 44
GGGUGGAAUAGUAUAACAAUAUGCUAAAUGUUGUUAUAGUAUCCCACCU
SEQ ID NO: 45
GGGUGGAAUAGUAUACCAUUCGUGGUAUAGUAUCCCACCU
SEQ ID NO: 46
GUGGGUGGAAUAGUAUACCAUUCGUGGUAUAGUAUCCCACCUAC
SEQ ID NO: 47
UGGGUGGAAUAGUAUACCAUUCGUGGUAUAGUAUCCCACCUA
SEQ ID NO: 48
GGUGGAAUAGUAUACCAUUCGUGGUAUAGUAUCCCACC
SEQ ID NO: 49
GUGGAAUAGUAUACCAUUCGUGGUAUAGUAUCCCAC
SEQ ID NO: 50
ACATGAGGATCACCCATGT
SEQ ID NO: 51
AAVALLPAVLLALLAP
SEQ ID NO: 52
AALLPVLLAAP
SEQ ID NO: 53
GRKKRRQRRRPPQ
SEQ ID NO: 54
RQIKIWFQNRRMKWKK
SEQ ID NO: 55
ATGGAACAAAAACTTATTTCTGAAGAAGATCTGGATATAGAAGATGAAGAAAACATGAGTTCCA
GCAGCACTGATGTGAAGGAAAACCGCAATCTGGACAACGTGTCCCCCAAGGATGGCAGCACACC
TGGGCCTGGCGAGGGCTCTCAGCTCTCCAATGGGGGTGGTGGTGGCCCCGGCAGAAAGCGGCCC
CTGGAGGAGGGCAGCAATGGCCACTCCAAGTACCGCCTGAAGAAAAGGAGGAAAACACCAGGGC
CCGTCCTCCCCAAGAACGCCCTGATGCAGCTGAATGAGATCAAGCCTGGTTTGCAGTACACACT
CCTGTCCCAGACTGGGCCCGTGCACGCGCCTTTGTTTGTCATGTCTGTGGAGGTGAATGGCCAG
GTTTTTGAGGGCTCTGGTCCCACAAAGAAAAAGGCAAAACTCCATGCTGCTGAGAAGGCCTTGA
GGTCTTTCGTTCAGTTTCCTAATGCCTCTGAGGCCCACCTGGCCATGGGGAGGACCCTGTCTGT
CAACACGGACTTCACATCTGACCAGGCCGACTTCCCTGACACGCTCTTCAATGGTTTTGAAACT
CCTGACAAGGCGGAGCCTCCCTTTTACGTGGGCTCCAATGGGGATGACTCCTTCAGTTCCAGCG
GGGACCTCAGCTTGTCTGCTTCCCCGGTGCCTGCCAGCCTAGCCCAGCCTCCTCTCCCTGTCTT
ACCACCATTCCCACCCCCGAGTGGGAAGAATCCCGTGATGATCTTGAACGAACTGCGCCCAGGA
CTCAAGTATGACTTCCTCTCCGAGAGCGGGGAGAGCCATGCCAAGAGCTTCGTCATGTCTGTGG
TCGTGGATGGTCAGTTCTTTGAAGGCTCGGGGAGAAACAAGAAGCTTGCCAAGGCCCGGGCTGC
GCAGTCTGCCCTGGCCGCCATTTTTAACTTGCACTTGGATCAGACGCCATCTCGCCAGCCTATT
CCCAGTGAGGGTCTTCAGCTGCATTTACCGCAGGTTTTAGCTGACGCTGTCTCACGCCTGGTCC
TGGGTAAGTTTGGTGACCTGACCGACAACTTCTCCTCCCCTCACGCTCGCAGAAAAGTGCTGGC
TGGAGTCGTCATGACAACAGGCACAGATGTTAAAGATGCCAAGGTGATAAGTGTTTCTACAGGA
ACAAAATGTATTAATGGTGAATACATGAGTGATCGTGGCCTTGCATTAAATGACTGCCATGCAG
AAATAATATCTCGGAGATCCTTGCTCAGATTTCTTTATACACAACTTGAGCTTTACTTAAATAA
CAAAGATGATCAAAAAAGATCCATCTTTCAGAAATCAGAGCGAGGGGGGTTTAGGCTGAAGGAG
AATGTCCAGTTTCATCTGTACATCAGCACCTCTCCCTGTGGAGATGCCAGAATCTTCTCACCAC
ATGAGCCAATCCTGGAAGAACCAGCAGATAGACACCCAAATCGTAAAGCAAGAGGACAGCTACG
GACCAAAATAGAGTCTGGIGAGGGGACGATTCCAGTGCGCTCCAATGCGAGCATCCAAACGTGG
GACGGGGTGCTGCAAGGGGAGCGGCTGCTCACCATGTCCTGCAGTGACAAGATTGCACGCTGGA
ACGTGGTGGGCATCCAGGGATCCCTGCTCAGCATTTTCGTGGAGCCCATTTACTTCTCGAGCAT
CATCCTGGGCAGCCTTTACCACGGGGACCACCTTTCCAGGGCCATGTACCAGCGGATCTCCAAC
ATAGAGGACCTGCCACCTCTCTACACCCTCAACAAGCCTTTGCTCAGTGGCATCAGCAATGCAG
AAGCACGGCAGCCAGGGAAGGCCCCCAACTTCAGTGTCAACTGGACGGTAGGCGACTCCGCTAT
TGAGGTCATCAACGCCACGACTGGGAAGGATGAGCTGGGCCGCGCGTCCCGCCTGTGTAAGCAC
GCGTTGTACTGTCGCTGGATGCGTGTGCACGGCAAGGTTCCCTCCCACTTACTACGCTCCAAGA
TTACCAAGCCCAACGTGTACCATGAGTCCAAGCTGGCGGCAAAGGAGTACCAGGCCGCCAAGGC
GCGTCTGTTCACAGCCTTCATCAAGGCGGGGCTGGGGGCCTGGGTGGAGAAGCCCACCGAGCAG
GACCAGTTCTCACTCACGCCCTGA
SEQ ID NO: 56
ATGGAACAAAAACTTATTTCTGAAGAAGATCTGAATCCGCGGCAGGGGTATTCCCTCAGCGGAT
ACTACACCCATCCATTTCAAGGCTATGAGCACAGACAGCTCAGGTACCAGCAGCCTGGGCCAGG
ATCTTCCCCCAGTAGTTTCCTGCTTAAGCAAATAGAATTTCTCAAGGGGCAGCTCCCAGAAGCA
CCGGTGATTGGAAAGCAGACACCGTCACTGCCACCTTCCCTCCCAGGACTCCGGCCAAGGTTTC
CAGTACTACTTGCCTCCAGTACCAGAGGCAGGCAAGTGGACATCAGGGGTGTCCCCAGGGGCGT
GCATCTCAGAAGTCAGGGGCTCCAGAGAGGGTTCCAGCATCCTTCACCACGTGGCAGGAGTCTG
CCACAGAGAGGTGTTGATTGCCTTTCCTCACATTTCCAGGAACTGAGTATCTACCAAGATCAGG
AACAAAGGATCTTAAAGTTCCTGGAAGAGCTTGGGGAAGGGAAGGCCACCACAGCACATGATCT
GTCTGGGAAACTTGGGACTCCGAAGAAAGAAATCAATCGAGTTTTATACTCCCTGGCAAAGAAG
GGCAAGCTACAGAAAGAGGCAGGAACACCCCCTTTGTGGAAAATCGCGGTCTCCACTCAGGCTT
GGAACCAGCACAGCGGAGTGGTAAGACCAGACGGTCATAGCCAAGGAGCCCCAAACTCAGACCC
GAGTTTGGAACCGGAAGACAGAAACTCCACATCTGTCTCAGAAGATCTTCTTGAGCCTTTTATT
GCAGTCTCAGCTCAGGCTTGGAACCAGCACAGCGGAGTGGTAAGACCAGACAGTCATAGCCAAG
GATCCCCAAACTCAGACCCAGGTTTGGAACCTGAAGACAGCAACTCCACATCTGCCTTGGAAGA
TCCTCTTGAGTTTTTAGACATGGCCGAGATCAAGGAGAAAATCTGCGACTATCTCTTCAATGTG
TCTGACTCCTCTGCCCTGAATTTGGCTAAAAATATTGGCCTTACCAAGGCCCGAGATATAAATG
CTGTGCTAATTGACATGGAAAGGCAGGGGGATGTCTATAGACAAGGGACAACCCCTCCCATATG
GCATTTGACAGACAAGAAGCGAGAGAGGATGCAAATCAAGAGAAATACGAACAGTGTTCCTGAA
ACCGCTCCAGCTGCAATCCCTGAGACCAAAAGAAACGCAGAGTTCCTCACCTGTAATATACCCA
CATCAAATGCCTCAAATAACATGGIAACCACAGAAAAAGTGGAGAATGGGCAGGAACCTGTCAT
AAAGTTAGAAAACAGGCAAGAGGCCAGACCAGAACCAGCAAGACTGAAACCACCTGTTCATTAC
AATGGCCCCTCAAAAGCAGGGTATGTTGACTTTGAAAATGGCCAGTGGGCCACAGATGACATCC
CAGATGACTTGAATAGTATCCGCGCAGCACCAGGTGAGTTTCGAGCCATCATGGAGATGCCCTC
CTTCTACAGTCATGGCTTGCCACGGTGTTCACCCTACAAGAAACTGACAGAGTGCCAGCTGAAG
AACCCCATCAGCGGGCTGTTAGAATATGCCCAGTTCGCTAGTCAAACCTGTGAGTTCAACATGA
TAGAGCAGAGTGGACCACCCCATGAACCTCGATTTAAATTCCAGGTTGTCATCAATGGCCGAGA
GTTTCCCCCAGCTGAAGCTGGAAGCAAGAAAGTGGCCAAGCAGGATGCAGCTATGAAAGCCATG
ACAATTCTGCTAGAGGAAGCCAAAGCCAAGGACAGTGGAAAATCAGAAGAATCATCCCACTATT
CCACAGAGAAAGAATCAGAGAAGACTGCAGAGTCCCAGACCCCCACCCCTTCAGCCACATCCTT
CTTTTCTGGGAAGAGCCCCGTCACCACACTGCTTGAGTGTATGCACAAATTGGGGAACTCCTGC
GAATTCCGTCTCCTGTCCAAAGAAGGCCCTGCCCATGAACCCAAGTTCCAATACTGTGTTGCAG
TGGGAGCCCAAACTTTCCCCAGTGTGAGTGCTCCCAGCAAGAAAGTGGCAAAGCAGATGGCCGC
AGAGGAAGCCATGAAGGCCCTGCATGGGGAGGCGACCAACTCCATGGCTTCTGATAACCAGCCT
GAAGGTATGATCTCAGAGTCACTTGATAACTTGGAATCCATGATGCCCAACAAGGTCAGGAAGA
TTGGCGAGCTCGTGAGATACCTGAACACCAACCCTGTGGGTGGCCTTTTGGAGTACGCCCGCTC
CCATGGCTTTGCTGCTGAATTCAAGTTGGTCGACCAGTCCGGACCTCCTCACGAGCCCAAGTTC
GTTTACCAAGCAAAAGTTGGGGGTCGCTGGTTCCCAGCCGTCTGCGCACACAGCAAGAAGCAAG
GCAAGCAGGAAGCAGCAGATGCGGCTCTCCGTGTCTTGATTGGGGAGAACGAGAAGGCAGAACG
CATGGGTTTCACAGAGGIAACCCCAGTGACAGGGGCCAGTCTCAGAAGAACTATGCTCCTCCTC
TCAAGGTCCCCAGAAGCACAGCCAAAGACACTCCCTCTCACTGGCAGCACCTTCCATGACCAGA
TAGCCATGCTGAGCCACCGGTGCTTCAACACTCTGACTAACAGCTTCCAGCCCTCCTTGCTCGG
CCGCAAGATTCTGGCCGCCATCATTATGAAAAAAGACTCTGAGGACATGGGTGTCGTCGTCAGC
TTGGGAACAGGGAATCGCTGTGTGAAAGGAGATTCTCTCAGCCTAAAAGGAGAAACTGTCAATG
ACTGCCATGCAGAAATAATCTCCCGGAGAGGCTTCATCAGGTTTCTCTACAGTGAGTTAATGAA
ATACAACTCCCAGACTGCGAAGGATAGTATATTTGAACCTGCTAAGGGAGGAGAAAAGCTCCAA
ATAAAAAAGACTGTGTCATTCCATCTGTATATCAGCACTGCTCCGTGTGGAGATGGCGCCCTCT
TTGACAAGTCCTGCAGCGACCGTGCTATGGAAAGCACAGAATCCCGCCACTACCCTGTCTTCGA
GAATCCCAAACAAGGAAAGCTCCGCACCAAGGTGGAGAACGGAGAAGGCACAATCCCTGTGGAA
TCCAGTGACATTGTGCCTACGTGGGATGGCATTCGGCTCGGGGAGAGACTCCGTACCATGTCCT
GTAGTGACAAAATCCTACGCTGGAACGTGCTGGGCCTGCAAGGGGCACTGTTGACCCACTTCCT
GCAGCCCATTTATCTCAAATCTGTCACATTGGGTTACCTTTTCAGCCAAGGGCATCTGACCCGT
GCTATTTGCTGTCGTGTGACAAGAGATGGGAGTGCATTTGAGGATGGACTACGACATCCCTTTA
TTGTCAACCACCCCAAGGTTGGCAGAGTCAGCATATATGATTCCAAAAGGCAATCCGGGAAGAC
TAAGGAGACAAGCGTCAACTGGTGTCTGGCTGATGGCTATGACCTGGAGATCCTGGACGGTACC
AGAGGCACTGTGGATGGGCCACGGAATGAATTGTCCCGGGTCTCCAAAAAGAACATTTTTCTTC
TATTTAAGAAGCTCTGCTCCTTCCGTTACCGCAGGGATCTACTGAGACTCTCCTATGGTGAGGC
CAAGAAAGCTGCCCGTGACTACGAGACGGCCAAGAACTACTTCAAAAAAGGCCTGAAGGATATG
GGCTATGGGAACTGGATTAGCAAACCCCAGGAGGAAAAGAACTTTTATCTCTGCCCAGTATAG
Homo sapiens methyl-CpG binding protein 2 (MECP2), NM_004992
SEQ ID NO: 57
CCGGCGTCGGCGGCGCGCGCGCTCCCTCCTCTCGGAGAGAGGGCTGTGGTAAAAGCCGTCCGGA
AAATGGCCGCCGCCGCCGCCGCCGCGCCGAGCGGAGGAGGAGGAGGAGGCGAGGAGGAGAGACT
GCTCCATAAAAATACAGACTCACCAGTTCCTGCTTTGATGTGACATGTGACTCCCCAGAATACA
CCTTGCTTCTGTAGACCAGCTCCAACAGGATTCCATGGTAGCTGGGATGTTAGGGCTCAGGGAA
GAAAAGTCAGAAGACCAGGACCTCCAGGGCCTCAAGGACAAACCCCTCAAGTTTAAAAAGGTGA
AGAAAGATAAGAAAGAAGAGAAAGAGGGCAAGCATGAGCCCGTGCAGCCATCAGCCCACCACTC
TGCTGAGCCCGCAGAGGCAGGCAAAGCAGAGACATCAGAAGGGTCAGGCTCCGCCCCGGCTGTG
CCGGAAGCTTCTGCCTCCCCCAAACAGCGGCGCTCCATCATCCGTGACCGGGGACCCATGTATG
ATGACCCCACCCTGCCTGAAGGCTGGACACGGAAGCTTAAGCAAAGGAAATCTGGCCGCTCTGC
TGGGAAGTATGATGTGTATTTGATCAATCCCCAGGGAAAAGCCTTTCGCTCTAAAGTGGAGTTG
ATTGCGTACTTCGAAAAGGTAGGCGACACATCCCTGGACCCTAATGATTTTGACTTCACGGTAA
CTGGGAGAGGGAGCCCCTCCCGGCGAGAGCAGAAACCACCTAAGAAGCCCAAATCTCCCAAAGC
TCCAGGAACTGGCAGAGGCCGGGGACGCCCCAAAGGGAGCGGCACCACGAGACCCAAGGCGGCC
ACGTCAGAGGGTGTGCAGGTGAAAAGGGTCCTGGAGAAAAGTCCTGGGAAGCTCCTTGTCAAGA
TGCCTTTTCAAACTTCGCCAGGGGGCAAGGCTGAGGGGGGTGGGGCCACCACATCCACCCAGGT
CATGGTGATCAAACGCCCCGGCAGGAAGCGAAAAGCTGAGGCCGACCCTCAGGCCATTCCCAAG
AAACGGGGCCGAAAGCCGGGGAGTGTGGTGGCAGCCGCTGCCGCCGAGGCCAAAAAGAAAGCCG
TGAAGGAGTCTTCTATCCGATCTGTGCAGGAGACCGTACTCCCCATCAAGAAGCGCAAGACCCG
GGAGACGGTCAGCATCGAGGTCAAGGAAGTGGTGAAGCCCCTGCTGGTGTCCACCCTCGGTGAG
AAGAGCGGGAAAGGACTGAAGACCTGTAAGAGCCCTGGGCGGAAAAGCAAGGAGAGCAGCCCCA
AGGGGCGCAGCAGCAGCGCCTCCTCACCCCCCAAGAAGGAGCACCACCACCATCACCACCACTC
AGAGTCCCCAAAGGCCCCCGTGCCACTGCTCCCACCCCTGCCCCCACCTCCACCTGAGCCCGAG
AGCTCCGAGGACCCCACCAGCCCCCCTGAGCCCCAGGACTTGAGCAGCAGCGTCTGCAAAGAGG
AGAAGATGCCCAGAGGAGGCTCACTGGAGAGCGACGGCTGCCCCAAGGAGCCAGCTAAGACTCA
GCCCGCGGTTGCCACCGCCGCCACGGCCGCAGAAAAGTACAAACACCGAGGGGAGGGAGAGCGC
AAAGACATTGTTTCATCCTCCATGCCAAGGCCAAACAGAGAGGAGCCTGTGGACAGCCGGACGC
CCGTGACCGAGAGAGTTAGCTGACTTTACACGGAGCGGATTGCAAAGCAAACCAACAAGAATAA
AGGCAGCTGTTGTCTCTTCTCCTTATGGGTAGGGCTCTGACAAAGCTTCCCGATTAACTGAAAT
AAAAAATATTTTTTTTTCTTTCAGTAAACTTAGAGTTTCGTGGCTTCAGGGTGGGAGTAGTTGG
AGCATTGGGGATGTTTTTCTTACCGACAAGCACAGTCAGGTTGAAGACCTAACCAGGGCCAGAA
GTAGCTTTGCACTTTTCTAAACTAGGCTCCTTCAACAAGGCTTGCTGCAGATACTACTGACCAG
ACAAGCTGTTGACCAGGCACCTCCCCTCCCGCCCAAACCTTTCCCCCATGTGGTCGTTAGAGAC
AGAGCGACAGAGCAGTTGAGAGGACACTCCCGTTTTCGGTGCCATCAGTGCCCCGTCTACAGCT
CCCCCAGCTCCCCCCACCTCCCCCACTCCCAACCACGTTGGGACAGGGAGGTGTGAGGCAGGAG
AGACAGTTGGATTCTTTAGAGAAGATGGATATGACCAGTGGCTATGGCCTGTGCGATCCCACCC
GTGGTGGCTCAAGTCTGGCCCCACACCAGCCCCAATCCAAAACTGGCAAGGACGCTTCACAGGA
CAGGAAAGTGGCACCTGTCTGCTCCAGCTCTGGCATGGCTAGGAGGGGGGAGTCCCTTGAACTA
CTGGGTGTAGACTGGCCTGAACCACAGGAGAGGATGGCCCAGGGTGAGGTGGCATGGTCCATTC
TCAAGGGACGTCCTCCAACGGGTGGCGCTAGAGGCCATGGAGGCAGTAGGACAAGGTGCAGGCA
GGCTGGCCTGGGGTCAGGCCGGGCAGAGCACAGCGGGGTGAGAGGGATTCCTAATCACTCAGAG
CAGTCTGTGACTTAGTGGACAGGGGAGGGGGCAAAGGGGGAGGAGAAGAAAATGTTCTTCCAGT
TACTTTCCAATTCTCCTTTAGGGACAGCTTAGAATTATTTGCACTATTGAGTCTTCATGTTCCC
ACTTCAAAACAAACAGATGCTCTGAGAGCAAACTGGCTTGAATTGGTGACATTTAGTCCCTCAA
GCCACCAGATGTGACAGTGTTGAGAACTACCTGGATTTGTATATATACCTGCGCTTGTTTTAAA
GTGGGCTCAGCACATAGGGTTCCCACGAAGCTCCGAAACTCTAAGTGTTTGCTGCAATTTTATA
AGGACTTCCTGATTGGTTTCTCTTCTCCCCTTCCATTTCTGCCTTTTGTTCATTTCATCCTTTC
ACTTCTTTCCCTTCCTCCGTCCTCCTCCTTCCTAGTTCATCCCTTCTCTTCCAGGCAGCCGCGG
TGCCCAACCACACTTGTCGGCTCCAGTCCCCAGAACTCTGCCTGCCCTTTGTCCTCCTGCTGCC
AGTACCAGCCCCACCCTGTTTTGAGCCCTGAGGAGGCCTTGGGCTCTGCTGAGTCCGACCTGGC
CTGTCTGTGAAGAGCAAGAGAGCAGCAAGGTCTTGCTCTCCTAGGTAGCCCCCTCTTCCCTGGT
AAGAAAAAGCAAAAGGCATTTCCCACCCTGAACAACGAGCCTTTTCACCCTTCTACTCTAGAGA
AGTGGACTGGAGGAGCTGGGCCCGATTTGGTAGTTGAGGAAAGCACAGAGGCCTCCTGTGGCCT
GCCAGTCATCGAGTGGCCCAACAGGGGCTCCATGCCAGCCGACCTTGACCTCACTCAGAAGTCC
AGAGTCTAGCGTAGTGCAGCAGGGCAGTAGCGGTACCAATGCAGAACTCCCAAGACCCGAGCTG
GGACCAGTACCTGGGTCCCCAGCCCTTCCTCTGCTCCCCCTTTTCCCTCGGAGTTCTTCTTGAA
TGGCAATGTTTTGCTTTTGCTCGATGCAGACAGGGGGCCAGAACACCACACATTTCACTGTCTG
TCTGGTCCATAGCTGTGGTGTAGGGGCTTAGAGGCATGGGCTTGCTGTGGGTTTTTAATTGATC
AGTTTTCATGTGGGATCCCATCTTTTTAACCTCTGTTCAGGAAGTCCTTATCTAGCTGCATATC
TTCATCATATTGGTATATCCTTTTCTGTGTTTACAGAGATGTCTCTTATATCTAAATCTGTCCA
ACTGAGAAGTACCTTATCAAAGTAGCAAATGAGACAGCAGTCTTATGCTTCCAGAAACACCCAC
AGGCATGTCCCATGTGAGCTGCTGCCATGAACTGTCAAGTGTGTGTTGTCTTGTGTATTTCAGT
TATTGTCCCTGGCTTCCTTACTATGGTGTAATCATGAAGGAGTGAAACATCATAGAAACTGTCT
AGCACTTCCTTGCCAGTCTTTAGTGATCAGGAACCATAGTTGACAGTTCCAATCAGTAGCTTAA
GAAAAAACCGTGTTTGTCTCTTCTGGAATGGTTAGAAGTGAGGGAGTTTGCCCCGTTCTGTTTG
TAGAGTCTCATAGTTGGACTTTCTAGCATATATGTGTCCATTTCCTTATGCTGTAAAAGCAAGT
CCTGCAACCAAACTCCCATCAGCCCAATCCCTGATCCCTGATCCCTTCCACCTGCTCTGCTGAT
GACCCCCCCAGCTTCACTTCTGACTCTTCCCCAGGAAGGGAAGGGGGGTCAGAAGAGAGGGTGA
GTCCTCCAGAACTCTTCCTCCAAGGACAGAAGGCTCCTGCCCCCATAGTGGCCTCGAACTCCTG
GCACTACCAAAGGACACTTATCCACGAGAGCGCAGCATCCGACCAGGTTGTCACTGAGAAGATG
TTTATTTTGGTCAGTTGGGTTTTTATGTATTATACTTAGTCAAATGTAATGTGGCTTCTGGAAT
CATTGTCCAGAGCTGCTTCCCCGTCACCTGGGCGTCATCTGGTCCTGGTAAGAGGAGTGCGTGG
CCCACCAGGCCCCCCTGTCACCCATGACAGTTCATTCAGGGCCGATGGGGCAGTCGTGGTTGGG
AACACAGCATTTCAAGCGTCACTTTATTTCATTCGGGCCCCACCTGCAGCTCCCTCAAAGAGGC
AGTTGCCCAGCCTCTTTCCCTTCCAGTTTATTCCAGAGCTGCCAGTGGGGCCTGAGGCTCCTTA
GGGTTTTCTCTCTATTTCCCCCTTTCTTCCTCATTCCCTCGTCTTTCCCAAAGGCATCACGAGT
CAGTCGCCTTTCAGCAGGCAGCCTTGGCGGTTTATCGCCCTGGCAGGCAGGGGCCCTGCAGCTC
TCATGCTGCCCCTGCCTTGGGGTCAGGTTGACAGGAGGTTGGAGGGAAAGCCTTAAGCTGCAGG
ATTCTCACCAGCTGIGTCCGGCCCAGTTTTGGGGTGTGACCTCAATTTCAATTTIGTCTGTACT
TGAACATTATGAAGATGGGGGCCTCTTTCAGTGAATTTGTGAACAGCAGAATTGACCGACAGCT
TTCCAGTACCCATGGGGCTAGGTCATTAAGGCCACATCCACAGTCTCCCCCACCCTTGTTCCAG
TTGTTAGTTACTACCTCCTCTCCTGACAATACTGTATGTCGTCGAGCTCCCCCCAGGTCTACCC
CTCCCGGCCCTGCCTGCTGGTGGGCTTGTCATAGCCAGTGGGATTGCCGGTCTTGACAGCTCAG
TGAGCTGGAGATACTTGGTCACAGCCAGGCGCTAGCACAGCTCCCTTCTGTTGATGCTGTATTC
CCATATCAAAAGACACAGGGGACACCCAGAAACGCCACATCCCCCAATCCATCAGTGCCAAACT
AGCCAACGGCCCCAGCTTCTCAGCTCGCTGGATGGCGGAAGCTGCTACTCGTGAGCGCCAGTGC
GGGTGCAGACAATCTTCTGTTGGGTGGCATCATTCCAGGCCCGAAGCATGAACAGTGCACCTGG
GACAGGGAGCAGCCCCAAATTGTCACCTGCTTCTCTGCCCAGCTTTTCATTGCTGTGACAGTGA
TGGCGAAAGAGGGTAATAACCAGACACAAACTGCCAAGTTGGGTGGAGAAAGGAGTTTCTTTAG
CTGACAGAATCTCTGAATTTTAAATCACTTAGTAAGCGGCTCAAGCCCAGGAGGGAGCAGAGGG
ATACGAGCGGAGTCCCCTGCGCGGGACCATCTGGAATTGGTTTAGCCCAAGTGGAGCCTGACAG
CCAGAACTCTGTGTCCCCCGTCTAACCACAGCTCCTTTTCCAGAGCATTCCAGTCAGGCTCTCT
GGGCTGACTGGGCCAGGGGAGGTTACAGGTACCAGTTCTTTAAGAAGATCTTTGGGCATATACA
TTTTTAGCCTGTGTCATTGCCCCAAATGGATTCCTGTTTCAAGTTCACACCTGCAGATTCTAGG
ACCTGTGTCCTAGACTTCAGGGAGTCAGCTGTTTCTAGAGTTCCTACCATGGAGTGGGTCTGGA
GGACCTGCCCGGTGGGGGGGCAGAGCCCTGCTCCCTCCGGGTCTTCCTACTCTTCTCTCTGCTC
TGACGGGATTTGTTGATTCTCTCCATTTTGGTGTCTTTCTCTTTTAGATATTGTATCAATCTTT
AGAAAAGGCATAGTCTACTTGTTATAAATCGTTAGGATACTGCCTCCCCCAGGGTCTAAAATTA
CATATTAGAGGGGAAAAGCTGAACACTGAAGTCAGTTCTCAACAATTTAGAAGGAAAACCTAGA
AAACATTTGGCAGAAAATTACATTTCGATGTTTTTGAATGAATACGAGCAAGCTTTTACAACAG
TGCTGATCTAAAAATACTTAGCACTTGGCCTGAGATGCCTGGTGAGCATTACAGGCAAGGGGAA
TCTGGAGGTAGCCGACCTGAGGACATGGCTTCTGAACCTGTCTTTTGGGAGTGGTATGGAAGGT
GGAGCGTTCACCAGTGACCTGGAAGGCCCAGCACCACCCTCCTTCCCACTCTTCTCATCTTGAC
AGAGCCTGCCCCAGCGCTGACGTGTCAGGAAAACACCCAGGGAACTAGGAAGGCACTTCTGCCT
GAGGGGCAGCCTGCCTTGCCCACTCCTGCTCTGCTCGCCTCGGATCAGCTGAGCCTTCTGAGCT
GGCCTCTCACTGCCTCCCCAAGGCCCCCTGCCTGCCCTGTCAGGAGGCAGAAGGAAGCAGGTGT
GAGGGCAGTGCAAGGAGGGAGCACAACCCCCAGCTCCCGCTCCGGGCTCCGACTTGTGCACAGG
CAGAGCCCAGACCCTGGAGGAAATCCTACCTTTGAATTCAAGAACATTTGGGGAATTTGGAAAT
CTCTTTGCCCCCAAACCCCCATTCTGTCCTACCTTTAATCAGGTCCTGCTCAGCAGTGAGAGCA
GATGAGGTGAAAAGGCCAAGAGGTTTGGCTCCTGCCCACTGATAGCCCCTCTCCCCGCAGTGTT
TGTGTGTCAAGTGGCAAAGCTGTTCTTCCTGGTGACCCTGATTATATCCAGTAACACATAGACT
GTGCGCATAGGCCTGCTTTGTCTCCTCTATCCTGGGCTTTTGTTTTGCTTTTTAGTTTTGCTTT
TAGTTTTTCTGTCCCTTTTATTTAACGCACCGACTAGACACACAAAGCAGTTGAATTTTTATAT
ATATATCTGTATATTGCACAATTATAAACTCATTTTGCTTGTGGCTCCACACACACAAAAAAAG
ACCTGTTAAAATTATACCTGTTGCTTAATTACAATATTTCTGATAACCATAGCATAGGACAAGG
GAAAATAAAAAAAGAAAAAAAAGAAAAAAAAACGACAAATCTGTCTGCTGGTCACTTCTTCTGT
CCAAGCAGATTCGTGGTCTTTTCCTCGCTTCTTTCAAGGGCTTTCCTGTGCCAGGTGAAGGAGG
CTCCAGGCAGCACCCAGGTTTTGCACTCTTGTTTCTCCCGTGCTTGTGAAAGAGGTCCCAAGGT
TCTGGGTGCAGGAGCGCTCCCTTGACCTGCTGAAGTCCGGAACGTAGTCGGCACAGCCTGGTCG
CCTTCCACCTCTGGGAGCTGGAGTCCACTGGGGTGGCCTGACTCCCCCAGTCCCCTTCCCGTGA
CCTGGTCAGGGTGAGCCCATGTGGAGTCAGCCTCGCAGGCCTCCCTGCCAGTAGGGTCCGAGTG
TGTTTCATCCTTCCCACTCTGTCGAGCCTGGGGGCTGGAGCGGAGACGGGAGGCCTGGCCTGTC
TCGGAACCTGTGAGCTGCACCAGGTAGAACGCCAGGGACCCCAGAATCATGTGCGTCAGTCCAA
GGGGTCCCCTCCAGGAGTAGTGAAGACTCCAGAAATGTCCCTTTCTTCTCCCCCATCCTACGAG
TAATTGCATTTGCTTTTGTAATTCTTAATGAGCAATATCTGCTAGAGAGTTTAGCTGTAACAGT
TCTTTTTGATCATCTTTTTTTAATAATTAGAAACACCAAAAAAATCCAGAAACTTGTTCTTCCA
AAGCAGAGAGCATTATAATCACCAGGGCCAAAAGCTTCCCTCCCTGCTGTCATTGCTTCTTCTG
AGGCCTGAATCCAAAAGAAAAACAGCCATAGGCCCTTTCAGTGGCCGGGCTACCCGTGAGCCCT
TCGGAGGACCAGGGCTGGGGCAGCCTCTGGGCCCACATCCGGGGCCAGCTCCGGCGTGTGTTCA
GTGTTAGCAGTGGGTCATGATGCTCTTTCCCACCCAGCCTGGGATAGGGGCAGAGGAGGCGAGG
AGGCCGTTGCCGCTGATGTTTGGCCGTGAACAGGTGGGTGTCTGCGTGCGTCCACGTGCGTGTT
TTCTGACTGACATGAAATCGACGCCCGAGTTAGCCTCACCCGGTGACCTCTAGCCCTGCCCGGA
TGGAGCGGGGCCCACCCGGTTCAGTGTTTCTGGGGAGCTGGACAGTGGAGTGCAAAAGGCTTGC
AGAACTTGAAGCCTGCTCCTTCCCTTGCTACCACGGCCTCCTTTCCGTTTGATTTGTCACTGCT
TCAATCAATAACAGCCGCTCCAGAGTCAGTAGTCAATGAATATATGACCAAATATCACCAGGAC
TGTTACTCAATGIGTGCCGAGCCCTTGCCCATGCTGGGCTCCCGTGTATCTGGACACTGTAACG
TGTGCTGTGTTTGCTCCCCTTCCCCTTCCTTCTTTGCCCTTTACTTGTCTTTCIGGGGTTTTTC
TGTTTGGGTTTGGTTTGGTTTTTATTTCTCCTTTTGTGTTCCAAACATGAGGTTCTCTCTACTG
GTCCTCTTAACTGTGGTGTTGAGGCTTATATTTGTGTAATTTTTGGTGGGTGAAAGGAATTTTG
CTAAGTAAATCTCTTCTGTGTTTGAACTGAAGTCTGTATTGTAACTATGTTTAAAGTAATTGTT
CCAGAGACAAATATTTCTAGACACTTTTTCTTTACAAACAAAAGCATTCGGAGGGAGGGGGATG
GTGACTGAGATGAGAGGGGAGAGCTGAACAGATGACCCCTGCCCAGATCAGCCAGAAGCCACCC
AAAGCAGTGGAGCCCAGGAGTCCCACTCCAAGCCAGCAAGCCGAATAGCTGATGTGTTGCCACT
TTCCAAGTCACTGCAAAACCAGGTTTTGTTCCGCCCAGTGGATTCTTGTTTTGCTTCCCCTCCC
CCCGAGATTATTACCACCATCCCGTGCTTTTAAGGAAAGGCAAGATTGATGTTTCCTTGAGGGG
AGCCAGGAGGGGATGTGTGTGTGCAGAGCTGAAGAGCTGGGGAGAATGGGGCTGGGCCCACCCA
AGCAGGAGGCTGGGACGCTCTGCTGTGGGCACAGGTCAGGCTAATGTTGGCAGATGCAGCTCTT
CCTGGACAGGCCAGGTGGTGGGCATTCTCTCTCCAAGGTGTGCCCCGTGGGCATTACTGTTTAA
GACACTTCCGTCACATCCCACCCCATCCTCCAGGGCTCAACACTGTGACATCTCTATTCCCCAC
CCTCCCCTTCCCAGGGCAATAAAATGACCATGGAGGGGGCTTGCACTCTCTTGGCTGTCACCCG
ATCGCCAGCAAAACTTAGATGIGAGAAAACCCCTTCCCATTCCATGGCGAAAACATCTCCTTAG
AAAAGCCATTACCCTCATTAGGCATGGTTTTGGGCTCCCAAAACACCTGACAGCCCCTCCCTCC
TCTGAGAGGCGGAGAGTGCTGACTGTAGTGACCATTGCATGCCGGGTGCAGCATCTGGAAGAGC
TAGGCAGGGTGTCTGCCCCCTCCTGAGTTGAAGTCATGCTCCCCTGTGCCAGCCCAGAGGCCGA
GAGCTATGGACAGCATTGCCAGTAACACAGGCCACCCTGTGCAGAAGGGAGCTGGCTCCAGCCT
GGAAACCTGTCTGAGGTTGGGAGAGGTGCACTTGGGGCACAGGGAGAGGCCGGGACACACTTAG
CTGGAGATGTCTCTAAAAGCCCTGTATCGTATTCACCTTCAGTTTTTGTGTTTTGGGACAATTA
CTTTAGAAAATAAGTAGGTCGTTTTAAAAACAAAAATTATTGATTGCTTTTTTGTAGTGTTCAG
AAAAAAGGTTCTTTGTGTATAGCCAAATGACTGAAAGCACTGATATATTTAAAAACAAAAGGCA
ATTTATTAAGGAAATTTGTACCATTTCAGTAAACCTGTCTGAATGTACCTGTATACGTTTCAAA
AACACCCCCCCCCCACTGAATCCCTGTAACCTATTTATTATATAAAGAGTTTGCCTTATAAATT
T
Homo sapiens MECP2 R255X
SEQ ID NO: 58
ATGTACCCATACGACGTCCCAGACTACGCTGTAGCTGGGATGTTAGGGCTCAGGGAAGAAAAGT
CAGAAGACCAGGACCTCCAGGGCCTCAAGGACAAACCCCTCAAGTTTAAAAAGGTGAAGAAAGA
TAAGAAAGAAGAGAAAGAGGGCAAGCATGAGCCCGTGCAGCCATCAGCCCACCACTCTGCTGAG
CCCGCAGAGGCAGGCAAAGCAGAGACATCAGAAGGGTCAGGCTCCGCCCCGGCTGTGCCGGAAG
CTTCTGCCTCCCCCAAACAGCGGCGCTCCATCATCCGTGACCGGGGACCCATGTATGATGACCC
CACCCTGCCTGAAGGCTGGACACGGAAGCTTAAGCAAAGGAAATCTGGCCGCTCTGCTGGGAAG
TATGATGIGTATTTGATCAATCCCCAGGGAAAAGCCTTTCGCTCTAAAGTGGAGTTGATTGCGT
ACTTCGAAAAGGTAGGCGACACATCCCTGGACCCTAATGATTTTGACTTCACGGTAACTGGGAG
AGGGAGCCCCTCCCGGCGAGAGCAGAAACCACCTAAGAAGCCCAAATCTCCCAAAGCTCCAGGA
ACTGGCAGAGGCCGGGGACGCCCCAAAGGGAGCGGCACCACGAGACCCAAGGCGGCCACGTCAG
AGGGTGTGCAGGTGAAAAGGGTCCTGGAGAAAAGTCCTGGGAAGCTCCTTGTCAAGATGCCTTT
TCAAACTTCGCCAGGGGGCAAGGCTGAGGGGGGTGGGGCCACCACATCCACCCAGGTCATGGTG
ATCAAACGCCCCGGCAGGAAGTGAAAAGCTGAGGCCGACCCTCAGGCCATTCCCAAGAAACGGG
GCCGAAAGCCGGGGAGTGTGGTGGCAGCCGCTGCCGCCGAGGCCAAAAAGAAAGCCGTGAAGGA
GTCTTCTATCCGATCTGTGCAGGAGACCGTACTCCCCATCAAGAAGCGCAAGACCCGGGAGACG
GTCAGCATCGAGGTCAAGGAAGTGGTGAAGCCCCTGCTGGTGTCCACCCTCGGTGAGAAGAGCG
GGAAAGGACTGAAGACCTGTAAGAGCCCTGGGCGGAAAAGCAAGGAGAGCAGCCCCAAGGGGCG
CAGCAGCAGCGCCTCCTCACCCCCCAAGAAGGAGCACCACCACCATCACCACCACTCAGAGTCC
CCAAAGGCCCCCGTGCCACTGCTCCCACCCCTGCCCCCACCTCCACCTGAGCCCGAGAGCTCCG
AGGACCCCACCAGCCCCCCTGAGCCCCAGGACTTGAGCAGCAGCGTCTGCAAAGAGGAGAAGAT
GCCCAGAGGAGGCTCACTGGAGAGCGACGGCTGCCCCAAGGAGCCAGCTAAGACTCAGCCCGCG
GTTGCCACCGCCGCCACGGCCGCAGAAAAGTACAAACACCGAGGGGAGGGAGAGCGCAAAGACA
TTGTTTCATCCTCCATGCCAAGGCCAAACAGAGAGGAGCCTGTGGACAGCCGGACGCCCGTGAC
CGAGAGAGTTAGCTGA,
Homo sapiens MECP2 R294X
SEQ ID NO: 59
ATGTACCCATACGACGTCCCAGACTACGCTGTAGCTGGGATGTTAGGGCTCAGGGAAGAAAAGT
CAGAAGACCAGGACCTCCAGGGCCTCAAGGACAAACCCCTCAAGTTTAAAAAGGTGAAGAAAGA
TAAGAAAGAAGAGAAAGAGGGCAAGCATGAGCCCGTGCAGCCATCAGCCCACCACTCTGCTGAG
CCCGCAGAGGCAGGCAAAGCAGAGACATCAGAAGGGTCAGGCTCCGCCCCGGCTGTGCCGGAAG
CTTCTGCCTCCCCCAAACAGCGGCGCTCCATCATCCGTGACCGGGGACCCATGTATGATGACCC
CACCCTGCCTGAAGGCTGGACACGGAAGCTTAAGCAAAGGAAATCTGGCCGCTCTGCTGGGAAG
TATGATGTGTATTTGATCAATCCCCAGGGAAAAGCCTTTCGCTCTAAAGTGGAGTTGATTGCGT
ACTTCGAAAAGGTAGGCGACACATCCCTGGACCCTAATGATTTTGACTTCACGGTAACTGGGAG
AGGGAGCCCCTCCCGGCGAGAGCAGAAACCACCTAAGAAGCCCAAATCTCCCAAAGCTCCAGGA
ACTGGCAGAGGCCGGGGACGCCCCAAAGGGAGCGGCACCACGAGACCCAAGGCGGCCACGTCAG
AGGGTGTGCAGGTGAAAAGGGTCCTGGAGAAAAGTCCTGGGAAGCTCCTTGTCAAGATGCCTTT
TCAAACTTCGCCAGGGGGCAAGGCTGAGGGGGGTGGGGCCACCACATCCACCCAGGTCATGGTG
ATCAAACGCCCCGGCAGGAAGCGAAAAGCTGAGGCCGACCCTCAGGCCATTCCCAAGAAACGGG
GCCGAAAGCCGGGGAGTGTGGTGGCAGCCGCTGCCGCCGAGGCCAAAAAGAAAGCCGTGAAGGA
GTCTTCTATCTGATCTGTGCAGGAGACCGTACTCCCCATCAAGAAGCGCAAGACCCGGGAGACG
GTCAGCATCGAGGTCAAGGAAGTGGTGAAGCCCCTGCTGGTGTCCACCCTCGGTGAGAAGAGCG
GGAAAGGACTGAAGACCTGTAAGAGCCCTGGGCGGAAAAGCAAGGAGAGCAGCCCCAAGGGGCG
CAGCAGCAGCGCCTCCTCACCCCCCAAGAAGGAGCACCACCACCATCACCACCACTCAGAGTCC
CCAAAGGCCCCCGTGCCACTGCTCCCACCCCTGCCCCCACCTCCACCTGAGCCCGAGAGCTCCG
AGGACCCCACCAGCCCCCCTGAGCCCCAGGACTTGAGCAGCAGCGTCTGCAAAGAGGAGAAGAT
GCCCAGAGGAGGCTCACTGGAGAGCGACGGCTGCCCCAAGGAGCCAGCTAAGACTCAGCCCGCG
GTTGCCACCGCCGCCACGGCCGCAGAAAAGTACAAACACCGAGGGGAGGGAGAGCGCAAAGACA
TTGTTTCATCCTCCATGCCAAGGCCAAACAGAGAGGAGCCTGTGGACAGCCGGACGCCCGTGAC
CGAGAGAGTTAGCTGA,
SEQ ID NO: 60
AGATGCCTTTCCAAGCATCGCC
SEQ ID NO: 61
TGGACACCAGCAGGGGCTTC
SEQ ID NO: 62
5′-
mG*mU*mG*mG*mAmAmUmAmGmUmAmUmAmAmCmAmAmUmAmUmGmCmUmAmAmAmUmGmUmU
mGmUmUmAmUmAmGmUmAmUmCmCmCmAmC-
mCmAmGmCmUmUdTdCdCmAmCmUmUmC*mC*mU*mG*mC-3′
SEQ ID NO: 63
5′-
mG*mU*mG*mG*mAmAmUmAmGmUmAmUmAmAmCmAmAmUmAmUmGmCmUmAmAmAmUmGmUmU
mGmUmUmAmUmAmGmUmAmUmCmCmCmAmC-
mCmAmGmCmUmUdTdCdCmAmCmUmUmCmCmUdG*mC*mC*mG-3′
SEQ ID NO: 64
5′-
mG*mG*mU*mG*mAmAmGmAmGmGmAmGmAmAmCmAmAmUmAmUmGmCmUmAmAmAmUmGmUmU
mGmUmUmCmUmCmGmUmCmUmCmCmAmCmC-
mCmAmGmCmUmUdTdCdCmAmCmUmUmC*mC*mU*mG*mC-3′
SEQ ID NO: 65
5′-
mG*mG*mU*mG*mUmCmGmAmGmAmAmGmAmGmGmAmGmAmAmCmAmAmUmAmUmGmCmUmAmA
mAmUmGmUmUmGmUmUmCmUmCmGmUmCmUmCmCmUmCmGmAmCmAmCmC-
mCmAmGmCmUmUdTdCdCmAmCmUmUmC*mC*mU*mG*mC-3′
SEQ ID NO: 66
5′-
mU*mU*mU*mC*mUmUmGmGmGmAmAmUmGmGmCmCmUmGmAmGmGmGmUmCmGmGmCmCmUmC
mAmGmCmUmUdTdCdCmAmCmUmUmCmCmUmG*mC*mC*mG*mG-3′
SEQ ID NO: 67
5′-
mU*mU*mU*mC*mUmUmGmGmGmAmAmUmGmGmCmCmUmGmAmGmGmGmUmCmGmGmCmCmUmC
mAmGmCmUmUmUdCdCmAmCmUmUmCmCmUmG*mC*mC*mG*mG-3′
SEQ ID NO: 68
5′-
mU*mU*mU*mC*mUmUmGmGmGmAmAmUmGmGmCmCmUmGmAmGmGmGmUmCmGmGmCmCmUmC
mAmGmCmUmUdTdCmCmAmCmUmUmCmCmUmG*mC*mC*mG*mG-3′
SEQ ID NO: 69
5′-
mU*mU*mU*mC*mUmUmGmGmGmAmAmUmGmGmCmCmUmGmAmGmAmGmUmCmAmGmCmCmUmC
mAmGmCmUmUdTdCdCmAmCmUmUmCmCmUmG*mC*mC*mG*mG-3′
SEQ ID NO: 70
5′-
mU*mU*mU*mC*mUmUmGmGmGmAmAmUmGmGmCmCmUmGmAmGmAmGmUmCmAmGmCmCmUmC
mAmGmCmUmUdGdCdCmAmCmUmUmCmCmUmG*mC*mC*mG*mG-3′
SEQ ID NO: 71
5′-
mU*mU*mU*mC*mUmUmGmGmGmAmAmUmGmGmCmCmUmGmCmGmGmGmCmCmGmGmCmCmUmC
mAmGmCmUmUdTdCdCmAmCmUmUmCmCmUmG*mC*mC*mG*mG-3′
SEQ ID NO: 72
5′-
mU*mU*mU*mC*mUmUmGmGmGmAmAmUmGmGmCmGmUmGmAmAmGmGmUmCmGmGmCmCmUmC
mAmGmCmUmUdTdCdCmAmCmUmUmCmCmUmG*mC*mC*mG*mG-3′
SEQ ID NO: 73
5′-
mU*mU*mU*mC*mUmUmGmGmGmAmAmUmGmGmCmGmUmGmAmAmGmGmUmCmGmGmCmCmUmC
mAmGmCmUmUdGdCdCmAmCmUmUmCmCmUmG*mC*mC*mG*mG-3′
SEQ ID NO: 74
5′-
mU*mU*mU*mC*mUmUmGmGmGmAmAmUmGmGmGmCmUmGmCmGmGmGmUmCmGmGmCmCmUmC
mAmGmCmUmUdTdCdCmAmCmUmUmCmCmUmG*mC*mC*mG*mG-3′
SEQ ID NO: 75
5′-
mU*mU*mU*mC*mUmUmGmGmGmAmAmUmAmGmCmCmCmGmAmGmGmGmUmCmGmGmCmCmUmC
mAmGmCmUmUdTdCdCmAmCmUmUmCmCmUmG*mC*mC*mG*mG-3′
SEQ ID NO: 76
5′-
mU*mU*mU*mC*mUmUmGmGmGmAmAmUmGmGmCmCmUmGmAmGmGmGmUmCmGmGmCmCmUmC
mAmGmCmUmUfUdCdCmAmCmUmUmCmCmUmG*mC*mC*mG*mG-3′
SEQ ID NO: 77
5′-
mU*mU*mU*mC*mUmUmGmGmGmAmAmUmGmGmCmCmUmGmAmGmGmGmUmCmGmGmCmCmUmC
mAmGmCmUmUdTfCdCmAmCmUmUmCmCmUmG*mC*mC*mG*mG-3′
SEQ ID NO: 78
5′-
mU*mU*mU*mC*mUmUmGmGmGmAmAmUmGmGmCmCmUmGmAmGmGmGmUmCmGmGmCmCmUmC
mAmGmCmUmUdTdCfCmAmCmUmUmCmCmUmG*mC*mC*mG*mG-3′
SEQ ID NO: 79
5′-
mU*mU*mU*mC*mUmUmGmGmGmAmAmUmGmGmCmCmUmGmAmGmGmGmUmCmGmGmCmCmUmC
mAmGmCmUmUfUfCfCmAmCmUmUmCmCmUmG*mC*mC*mG*mG-3′
SEQ ID NO: 80
5′-
mU*mU*mU*mC*mUmUmGmGmGmAmAmUmGmGmCmCmUmGmAmGmGmGmUmCmGmGmCmCmUmC
mAmGmCmUmUdTfCfCmAmCmUmUmCmCmUmG*mC*mC*mG*mG-3′
SEQ ID NO: 81
5′-
mU*mU*mU*mC*mUmUmGmGmGmAmAmUmGmGmCmCmUmGmAmGmGmGmUmCmGmGmCmCmUmC
mAmGmCmUmUfUfCdCmAmCmUmUmCmCmUmG*mC*mC*mG*mG-3′
SEQ ID NO: 82
5′-
mU*mU*mU*mC*mUmUmGmGmGmAmAmUmGmGmCmCmUmGmAmGmGmGmUmCmGmGmCmCmUmC
mAmGmCmUmUfUdCfCmAmCmUmUmCmCmUmG*mC*mC*mG*mG-3′
SEQ ID NO: 83
5′-
mG*mU*mG*mG*mAmAmUmAmGmUmAmUmAmAmCmAmAmUmAmUmGmCmUmAmAmAmUmGmUmU
mGmUmUmAmUmAmGmUmAmUmCmCmCmAmC-
mGmCmAmCmAmGdAdCdCmAmGmAmUmA*mG*mA*mA*mG-3′
SEQ ID NO: 84
5′-
mG*mU*mG*mG*mAmAmUmAmGmUmAmUmAmAmCmAmAmUmAmUmGmCmUmAmAmAmUmGmUmU
mGmUmUmAmUmAmGmUmAmUmCmCmCmAmC-
mGmCmAmCmAmGdAdCdCmAmGmAmUmAmGmA*mA*mG*mA*mC-3′
SEQ ID NO: 85
5′-
mG*mG*mU*mG*mAmAmGmAmGmGmAmGmAmAmCmAmAmUmAmUmGmCmUmAmAmAmUmGmUmU
mGmUmUmCmUmCmGmUmCmUmCmCmAmCmC-
mGmCmAmCmAmGdAdCdCmAmGmAmUmA*mG*mA*mA*mG-3′
SEQ ID NO: 86
5′-
mG*mG*mU*mG*mUmCmGmAmGmAmAmGmAmGmGmAmGmAmAmCmAmAmUmAmUmGmCmUmAmA
mAmUmGmUmUmGmUmUmCmUmCmGmUmCmUmCmCmUmCmGmAmCmAmCmC-
mGmCmAmCmAmGdAdCdCmAmGmAmUmA*mG*mA*mA*mG-3′
SEQ ID NO: 87
5′-
mG*mC*mG*mC*mUmUmCmUmUmGmAmUmGmGmGmGmAmGmUmAmCmGmGmUmCmUmCmCmUmG
mCmAmCmAmGdAdCdCmAmGmAmUmAmGmAmA*mG*mA*mC*mU-3′
SEQ ID NO: 88
5′-
mG*mC*mG*mC*mUmUmCmUmUmGmAmUmGmGmGmGmAmGmUmAmGmGmGmUmGmUmCmCmUmG
mCmAmCmAmGdAdCdCmAmGmAmUmAmGmAmA*mG*mA*mC*mU-3′
SEQ ID NO: 89
5′-
mG*mC*mG*mC*mUmUmCmUmUmGmAmUmGmGmGmGmAmGmUmCmCmGmGmCmCmUmCmCmUmG
mCmAmCmAmGdAdCdCmAmGmAmUmAmGmAmA*mG*mA*mC*mU-3′
SEQ ID NO: 90
5′-
mG*mC*mG*mC*mUmUmCmUmUmGmAmUmGmGmGmGmAmAmUmAmCmAmGmUmCmUmCmCmUmG
mCmAmCmAmGdAdCdCmAmGmAmUmAmGmAmA*mG*mA*mC*mU-3′
SEQ ID NO: 91
5′-
mG*mC*mG*mC*mUmUmCmUmUmGmAmUmGmGmGmAmAmGmUmCmCmGmGmUmCmUmCmCmUmG
mCmAmCmAmGdAdCdCmAmGmAmUmAmGmAmA*mG*mA*mC*mU-3′
SEQ ID NO: 92
5′-
mG*mC*mG*mC*mUmUmCmUmUmGmAmUmGmGmAmGmAmGmCmAmCmGmGmUmCmUmCmCmUmG
mCmAmCmAmGdAdCdCmAmGmAmUmAmGmAmA*mG*mA*mC*mU-3′
SEQ ID NO: 93
5′-
mG*mC*mG*mC*mUmUmCmUmUmGmAmUmGmGmGmAmAmGmUmCmCmGmGmUmCmUmCmCmUmG
mCmAmCmAmGfAdCdCmAmGmAmUmAmGmAmA*mG*mA*mC*mU-3′
SEQ ID NO: 94
5′-
mG*mC*mG*mC*mUmUmCmUmUmGmAmUmGmGmGmAmAmGmUmCmCmGmGmUmCmUmCmCmUmG
mCmAmCmAmGdAfCdCmAmGmAmUmAmGmAmA*mG*mA*mC*mU-3′
SEQ ID NO: 95
5′-
mG*mC*mG*mC*mUmUmCmUmUmGmAmUmGmGmGmAmAmGmUmCmCmGmGmUmCmUmCmCmUmG
mCmAmCmAmGdAdCfCmAmGmAmUmAmGmAmA*mG*mA*mC*mU-3′
SEQ ID NO: 96
5′-
mG*mC*mG*mC*mUmUmCmUmUmGmAmUmGmGmGmAmAmGmUmCmCmGmGmUmCmUmCmCmUmG
mCmAmCmAmGfAfCfCmAmGmAmUmAmGmAmA*mG*mA*mC*mU-3′
SEQ ID NO: 97
5′
mG*mC*mG*mC*mUmUmCmUmUmGmAmUmGmGmGmAmAmGmUmCmCmGmGmUmCmUmCmCmUmG
mCmAmCmAmGdAfCfCmAmGmAmUmAmGmAmA*mG*mA*mC*mU-3′
SEQ ID NO: 98
5′-
mG*mC*mG*mC*mUmUmCmUmUmGmAmUmGmGmGmAmAmGmUmCmCmGmGmUmCmUmCmCmUmG
mCmAmCmAmGfAfCdCmAmGmAmUmAmGmAmA*mG*mA*mC*mU-3′
SEQ ID NO: 99
AGAAAAGTCCTGGGAAGCTC
SEQ ID NO: 100
GGACTCTGAGTGGTGGTGAT

The application's sequence listing, which the Patent Office published only in electronic form, follows.

SEQUENCE LISTING (250 sequences)

SEQ ID NO: 1 - RNA, 20 nt, synthetic construct
  source 1..20: mol_type = other RNA; note = Description of Artificial Sequence: Synthetic oligonucleotide
ggtgaatagtataacaatat

SEQ ID NO: 2 - RNA, 20 nt, synthetic construct
  source 1..20: mol_type = other RNA; note = Description of Artificial Sequence: Synthetic oligonucleotide
atgttgttatagtatccacc

SEQ ID NO: 3 - RNA, 45 nt, synthetic construct
  source 1..45: mol_type = other RNA; note = Description of Artificial Sequence: Synthetic oligonucleotide
ggtgaatagtataacaatatgctaaatgttgttatagtatccacc

SEQ ID NO: 4 - RNA, 20 nt, synthetic construct
  source 1..20: mol_type = other RNA; note = Description of Artificial Sequence: Synthetic oligonucleotide
ggtgaagaggagaacaatat

SEQ ID NO: 5 - RNA, 20 nt, synthetic construct
  source 1..20: mol_type = other RNA; note = Description of Artificial Sequence: Synthetic oligonucleotide
atgttgttctcgtctccacc

SEQ ID NO: 6 - RNA, 45 nt, synthetic construct
  source 1..45: mol_type = other RNA; note = Description of Artificial Sequence: Synthetic oligonucleotide
ggtgaagaggagaacaatatgctaaatgttgttctcgtctccacc

SEQ ID NO: 7 - RNA, 25 nt, synthetic construct
  source 1..25: mol_type = other RNA; note = Description of Artificial Sequence: Synthetic oligonucleotide
ggtgtcgagaagaggagaacaatat

SEQ ID NO: 8 - RNA, 25 nt, synthetic construct
  source 1..25: mol_type = other RNA; note = Description of Artificial Sequence: Synthetic oligonucleotide
atgttgttctcgtctcctcgacacc

SEQ ID NO: 9 - RNA, 55 nt, synthetic construct
  source 1..55: mol_type = other RNA; note = Description of Artificial Sequence: Synthetic oligonucleotide
ggtgtcgagaagaggagaacaatatgctaaatgttgttctcgtctcctcgacacc

SEQ ID NO: 10 - RNA, 22 nt, synthetic construct
  source 1..22: mol_type = other RNA; note = Description of Artificial Sequence: Synthetic oligonucleotide
gggtggaatagtataacaatat

SEQ ID NO: 11 - RNA, 22 nt, synthetic construct
  source 1..22: mol_type = other RNA; note = Description of Artificial Sequence: Synthetic oligonucleotide
atgttgttatagtatcccacct

SEQ ID NO: 12 - RNA, 49 nt, synthetic construct
  source 1..49: mol_type = other RNA; note = Description of Artificial Sequence: Synthetic oligonucleotide
gggtggaatagtataacaatatgctaaatgttgttatagtatcccacct

SEQ ID NO: 13 - RNA, 20 nt, synthetic construct
  source 1..20: mol_type = other RNA; note = Description of Artificial Sequence: Synthetic oligonucleotide
gtggaatagtataacaatat

SEQ ID NO: 14 - RNA, 20 nt, synthetic construct
  source 1..20: mol_type = other RNA; note = Description of Artificial Sequence: Synthetic oligonucleotide
atgttgttatagtatcccac

SEQ ID NO: 15 - RNA, 45 nt, synthetic construct
  source 1..45: mol_type = other RNA; note = Description of Artificial Sequence: Synthetic oligonucleotide
gtggaatagtataacaatatgctaaatgttgttatagtatcccac

SEQ ID NO: 16 - RNA, 25 nt, synthetic construct
  source 1..25: mol_type = other RNA; note = Description of Artificial Sequence: Synthetic oligonucleotide
ggtgtcgagaatagtataacaatat

SEQ ID NO: 17 - RNA, 25 nt, synthetic construct
  source 1..25: mol_type = other RNA; note = Description of Artificial Sequence: Synthetic oligonucleotide
atgttgttatagtatcctcgacacc

SEQ ID NO: 18 - RNA, 55 nt, synthetic construct
  source 1..55: mol_type = other RNA; note = Description of Artificial Sequence: Synthetic oligonucleotide
ggtgtcgagaatagtataacaatatgctaaatgttgttatagtatcctcgacacc

SEQ ID NO: 19 - RNA, 22 nt, synthetic construct
  source 1..22: mol_type = other RNA; note = Description of Artificial Sequence: Synthetic oligonucleotide
gggtggaatagtataacaatat

SEQ ID NO: 20 - RNA, 22 nt, synthetic construct
  source 1..22: mol_type = other RNA; note = Description of Artificial Sequence: Synthetic oligonucleotide
atgttgttatagtatcccacct

SEQ ID NO: 21 - RNA, 49 nt, synthetic construct; identical to SEQ ID NO: 12
  source 1..49: mol_type = other RNA; note = Description of Artificial Sequence: Synthetic oligonucleotide

SEQ ID NO: 22 - RNA, 18 nt, synthetic construct
  source 1..18: mol_type = other RNA; note = Description of Artificial Sequence: Synthetic oligonucleotide
gggtggaatagtatacca

SEQ ID NO: 23 - RNA, 18 nt, synthetic construct
  source 1..18: mol_type = other RNA; note = Description of Artificial Sequence: Synthetic oligonucleotide
tggtatagtatcccacct

SEQ ID NO: 24 - RNA, 40 nt, synthetic construct
  source 1..40: mol_type = other RNA; note = Description of Artificial Sequence: Synthetic oligonucleotide
gggtggaatagtataccattcgtggtatagtatcccacct

SEQ ID NO: 25 - RNA, 20 nt, synthetic construct
  source 1..20: mol_type = other RNA; note = Description of Artificial Sequence: Synthetic oligonucleotide
gtgggtggaatagtatacca

SEQ ID NO: 26 - RNA, 20 nt, synthetic construct
  source 1..20: mol_type = other RNA; note = Description of Artificial Sequence: Synthetic oligonucleotide
tggtatagtatcccacctac

SEQ ID NO: 27 - RNA, 44 nt, synthetic construct
  source 1..44: mol_type = other RNA; note = Description of Artificial Sequence: Synthetic oligonucleotide
gtgggtggaatagtataccattcgtggtatagtatcccacctac

SEQ ID NO: 28 - RNA, 19 nt, synthetic construct
  source 1..19: mol_type = other RNA; note = Description of Artificial Sequence: Synthetic oligonucleotide
tgggtggaatagtatacca

SEQ ID NO: 29 - RNA, 19 nt, synthetic construct
  source 1..19: mol_type = other RNA; note = Description of Artificial Sequence: Synthetic oligonucleotide
tggtatagtatcccaccta

SEQ ID NO: 30 - RNA, 42 nt, synthetic construct
  source 1..42: mol_type = other RNA; note = Description of Artificial Sequence: Synthetic oligonucleotide
tgggtggaatagtataccattcgtggtatagtatcccaccta

SEQ ID NO: 31 - RNA, 17 nt, synthetic construct
  source 1..17: mol_type = other RNA; note = Description of Artificial Sequence: Synthetic oligonucleotide
ggtggaatagtatacca

SEQ ID NO: 32 - RNA, 17 nt, synthetic construct
  source 1..17: mol_type = other RNA; note = Description of Artificial Sequence: Synthetic oligonucleotide
tggtatagtatcccacc

SEQ ID NO: 33 - RNA, 38 nt, synthetic construct
  source 1..38: mol_type = other RNA; note = Description of Artificial Sequence: Synthetic oligonucleotide
ggtggaatagtataccattcgtggtatagtatcccacc

SEQ ID NO: 34 - RNA, 16 nt, synthetic construct
  source 1..16: mol_type = other RNA; note = Description of Artificial Sequence: Synthetic oligonucleotide
gtggaatagtatacca

SEQ ID NO: 35 - RNA, 16 nt, synthetic construct
  source 1..16: mol_type = other RNA; note = Description of Artificial Sequence: Synthetic oligonucleotide
tggtatagtatcccac

SEQ ID NO: 36 - RNA, 36 nt, synthetic construct
  source 1..36: mol_type = other RNA; note = Description of Artificial Sequence: Synthetic oligonucleotide
gtggaatagtataccattcgtggtatagtatcccac

SEQ ID NO: 37 - RNA, 45 nt, synthetic construct; identical to SEQ ID NO: 3
  source 1..45: mol_type = other RNA; note = Description of Artificial Sequence: Synthetic oligonucleotide

SEQ ID NO: 38 - RNA, 45 nt, synthetic construct; identical to SEQ ID NO: 6
  source 1..45: mol_type = other RNA; note = Description of Artificial Sequence: Synthetic oligonucleotide

SEQ ID NO: 39 - RNA, 55 nt, synthetic construct; identical to SEQ ID NO: 9
  source 1..55: mol_type = other RNA; note = Description of Artificial Sequence: Synthetic oligonucleotide

SEQ ID NO: 40 - RNA, 55 nt, synthetic construct
  source 1..55: mol_type = other RNA; note = Description of Artificial Sequence: Synthetic oligonucleotide
  misc_difference 1: note = modified_base - Any 2'-O-methylnucleotide phosphorothioate
  misc_difference 2: note = modified_base - Any 2'-O-methylnucleotide phosphorothioate
  misc_difference 3: note = modified_base - Any 2'-O-methylnucleotide
  misc_difference 5: note = modified_base - Any 2'-O-methylnucleotide
  misc_difference 6: note = modified_base - Any 2'-O-methylnucleotide
  misc_difference 20: note = modified_base - Any 2'-O-methylnucleotide
  misc_difference 23: note = modified_base - Any 2'-O-methylnucleotide
  misc_difference 25: note = modified_base - Any 2'-O-methylnucleotide
  misc_difference 27: note = modified_base - Any 2'-O-methylnucleotide
  misc_difference 28: note = modified_base - Any 2'-O-methylnucleotide
  misc_difference 32: note = modified_base - Any 2'-O-methylnucleotide
  misc_difference 34: note = modified_base - Any 2'-O-methylnucleotide
  misc_difference 35: note = modified_base - Any 2'-O-methylnucleotide
  misc_difference 37: note = modified_base - Any 2'-O-methylnucleotide
  misc_difference 38: note = modified_base - Any 2'-O-methylnucleotide
  misc_difference 39: note = modified_base - Any 2'-O-methylnucleotide
  misc_difference 40: note = modified_base - Any 2'-O-methylnucleotide
  misc_difference 41: note = modified_base - Any 2'-O-methylnucleotide
  misc_difference 43: note = modified_base - Any 2'-O-methylnucleotide
  misc_difference 44: note = modified_base - Any 2'-O-methylnucleotide
  misc_difference 45: note = modified_base - Any 2'-O-methylnucleotide
  misc_difference 46: note = modified_base - Any 2'-O-methylnucleotide
  misc_difference 47: note = modified_base - Any 2'-O-methylnucleotide
  misc_difference 48: note = modified_base - Any 2'-O-methylnucleotide
  misc_difference 49: note = modified_base - Any 2'-O-methylnucleotide
  misc_difference 52: note = modified_base - Any 2'-O-methylnucleotide
  misc_difference 54: note = modified_base - Any 2'-O-methylnucleotide
  misc_difference 55: note = modified_base - Any 2'-O-methylnucleotide
nnngnngagaagaggagaanaanangnnaaangnngnnnnngnnnnnnnganann

SEQ ID NO: 41 - RNA, 49 nt, synthetic construct; identical to SEQ ID NO: 12
  source 1..49: mol_type = other RNA; note = Description of Artificial Sequence: Synthetic oligonucleotide

SEQ ID NO: 42 - RNA, 45 nt, synthetic construct; identical to SEQ ID NO: 15
  source 1..45: mol_type = other RNA; note = Description of Artificial Sequence: Synthetic oligonucleotide

SEQ ID NO: 43 - RNA, 55 nt, synthetic construct; identical to SEQ ID NO: 18
  source 1..55: mol_type = other RNA; note = Description of Artificial Sequence: Synthetic oligonucleotide

SEQ ID NO: 44 - RNA, 49 nt, synthetic construct; identical to SEQ ID NO: 12
  source 1..49: mol_type = other RNA; note = Description of Artificial Sequence: Synthetic oligonucleotide

SEQ ID NO: 45 - RNA, 40 nt, synthetic construct; identical to SEQ ID NO: 24
  source 1..40: mol_type = other RNA; note = Description of Artificial Sequence: Synthetic oligonucleotide

SEQ ID NO: 46 - RNA, 44 nt, synthetic construct; identical to SEQ ID NO: 27
  source 1..44: mol_type = other RNA; note = Description of Artificial Sequence: Synthetic oligonucleotide

SEQ ID NO: 47 - RNA, 42 nt, synthetic construct; identical to SEQ ID NO: 30
  source 1..42: mol_type = other RNA; note = Description of Artificial Sequence: Synthetic oligonucleotide

SEQ ID NO: 48 - RNA, 38 nt, synthetic construct; identical to SEQ ID NO: 33
  source 1..38: mol_type = other RNA; note = Description of Artificial Sequence: Synthetic oligonucleotide

SEQ ID NO: 49 - RNA, 36 nt, synthetic construct; identical to SEQ ID NO: 36
  source 1..36: mol_type = other RNA; note = Description of Artificial Sequence: Synthetic oligonucleotide

SEQ ID NO: 50 - DNA, 19 bp, synthetic construct
  source 1..19: mol_type = other DNA; note = Description of Artificial Sequence: Synthetic oligonucleotide
acatgaggatcacccatgt

SEQ ID NO: 51 - protein, 16 aa, unidentified
  source 1..16: note = Description of Unknown: RFGF peptide
AAVALLPAVLLALLAP

SEQ ID NO: 52 - protein, 11 aa, unidentified
  source 1..11: note = Description of Unknown: RFGF analogue peptide
AALLPVLLAAP

SEQ ID NO: 53 - protein, 13 aa, Human immunodeficiency virus
GRKKRRQRRRPPQ

SEQ ID NO: 54 - protein, 16 aa, Drosophila sp.
RQIKIWFQNRRMKWKK

SEQ ID NO: 55 - DNA, 2136 bp, Homo sapiens
  source 1..2136: mol_type = unassigned DNA
atggaacaaaaacttatttctgaagaagatctggatatagaagatgaagaaaacatgagttccagcagcactgatgtgaaggaaaaccgcaatctggacaacgtgtcccccaaggatggcagcacacctgggcctggcgagggctctcagctctccaatgggggtggtggtggccccggcagaaagcggcccctggaggagggcagcaatggccactccaagtaccgcctgaagaaaaggaggaaaacaccagggcccgtcctccccaagaacgccctgatgcagctgaatgagatcaagcctggtttgcagtacacactcctgtcccagactgggcccgtgcacgcgcctttgtttgtcatgtctgtggaggtgaatggccaggtttttgagggctctggtcccacaaagaaaaaggcaaaactccatgctgctgagaaggccttgaggtctttcgttcagtttcctaatgcctctgaggcccacctggccatggggaggaccctgtctgtcaacacggacttcacatctgaccaggccgacttccctgacacgctcttcaatggttttgaaactcctgacaaggcggagcctcccttttacgtgggctccaatggggatgactccttcagttccagcggggacctcagcttgtctgcttccccggtgcctgccagcctagcccagcctcctctccctgtcttaccaccattcccacccccgagtgggaagaatcccgtgatgatcttgaacgaactgcgcccaggactcaagtatgacttcctctccgagagcggggagagccatgccaagagcttcgtcatgtctgtggtcgtggatggtcagttctttgaaggctcggggagaaacaagaagcttgccaaggcccgggctgcgcagtctgccctggccgccatttttaacttgcacttggatcagacgccatctcgccagcctattcccagtgagggtcttcagctgcatttaccgcaggttttagctgacgctgtctcacgcctggtcctgggtaagtttggtgacctgaccgacaacttctcctcccctcacgctcgcagaaaagtgctggctggagtcgtcatgacaacaggcacagatgttaaagatgccaaggtgataagtgtttctacaggaacaaaatgtattaatggtgaatacatgagtgatcgtggccttgcattaaatgactgccatgcagaaataatatctcggagatccttgctcagatttctttatacacaacttgagctttacttaaataacaaagatgatcaaaaaagatccatctttcagaaatcagagcgaggggggtttaggctgaaggagaatgtccagtttcatctgtacatcagcacctctccctgtggagatgccagaatcttctcaccacatgagccaatcctggaagaaccagcagatagacacccaaatcgtaaagcaagaggacagctacggaccaaaatagagtctggtgaggggacgattccagtgcgctccaatgcgagcatccaaacgtgggacggggtgctgcaaggggagcggctgctcaccatgtcctgcagtgacaagattgcacgctggaacgtggtgggcatccagggatccctgctcagcattttcgtggagcccatttacttctcgagcatcatcctgggcagcctttaccacggggaccacctttccagggccatgtaccagcggatctccaacatagaggacctgccacctctctacaccctcaacaagcctttgctcagtggcatcagcaatgcagaagcacggcagccagggaaggcccccaacttcagtgtcaactggacggtaggcgactccgctattgaggtcatcaacgccacgactgggaaggatgagctgggccgcgcgtcccgcctgtgtaagcacgcgttgtactgtcgctggatgcgtgtgcacggcaaggttccctcccacttactacgctccaagattaccaagcccaacgtgtaccatgagtccaagctggcggcaaaggagtaccaggccgccaaggcgcgtctgttcacagccttcatcaaggcggggctgggggcctgggtggagaagcccaccgagcaggaccagttctcactcacgccctga

SEQ ID NO: 56 - DNA, 3711 bp, Homo sapiens
  source 1..3711: mol_type = unassigned DNA
atggaacaaaaacttatttctgaagaagatctgaatccgcggcaggggtattccctcagcggatactacacccatccatttcaaggctatgagcacagacagctcaggtaccagcagcctgggccaggatcttcccccagtagtttcctgcttaagcaaatagaatttctcaaggggcagctcccagaagcaccggtgattggaaagcagacaccgtcactgccaccttccctcccaggactccggccaaggtttccagtactacttgcctccagtaccagaggcaggcaagtggacatcaggggtgtccccaggggcgtgcatctcagaagtcaggggctccagagagggttccagcatccttcaccacgtggcaggagtctgccacagagaggtgttgattgcctttcctcacatttccaggaactgagtatctaccaagatcaggaacaaaggatcttaaagttcctggaagagcttggggaagggaaggccaccacagcacatgatctgtctgggaaacttgggactccgaagaaagaaatcaatcgagttttatactccctggcaaagaagggcaagctacagaaagaggcaggaacaccccctttgtggaaaatcgcggtctccactcaggcttggaaccagcacagcggagtggtaagaccagacggtcatagccaaggagccccaaactcagacccgagtttggaaccggaagacagaaactccacatctgtctcagaagatcttcttgagccttttattgcagtctcagctcaggcttggaaccagcacagcggagtggtaagaccagacagtcatagccaaggatccccaaactcagacccaggtttggaacctgaagacagcaactccacatctgccttggaagatcctcttgagtttttagacatggccgagatcaaggagaaaatctgcgactatctcttcaatgtgtctgactcctctgccctgaatttggctaaaaatattggccttaccaaggcccgagatataaatgctgtgctaattgacatggaaaggcagggggatgtctatagacaagggacaacccctcccatatggcatttgacagacaagaagcgagagaggatgcaaatcaagagaaatacgaacagtgttcctgaaaccgctccagctgcaatccctgagaccaaaagaaacgcagagttcctcacctgtaatatacccacatcaaatgcctcaaataacatggtaaccacagaaaaagtggagaatgggcaggaacctgtcataaagttagaaaacaggcaagaggccagaccagaaccagcaagactgaaaccacctgttcattacaatggcccctcaaaagcagggtatgttgactttgaaaatggccagtgggccacagatgacatcccagatgacttgaatagtatccgcgcagcaccaggtgagtttcgagccatcatggagatgccctccttctacagtcatggcttgccacggtgttcaccctacaagaaactgacagagtgccagctgaagaaccccatcagcgggctgttagaatatgcccagttcgctagtcaaacctgtgagttcaacatgatagagcagagtggaccaccccatgaacctcgatttaaattccaggttgtcatcaatggccgagagtttcccccagctgaagctggaagcaagaaagtggccaagcaggatgcagctatgaaagccatgacaattctgctagaggaagccaaagccaaggacagtggaaaatcagaagaatcatcccactattccacagagaaagaatcagagaagactgcagagtcccagacccccaccccttcagccacatccttcttttctgggaagagccccgtcaccacactgcttgagtgtatgcacaaattggggaactcctgcgaattccgtctcctgtccaaagaaggccctgcccatgaacccaagttccaatactgtgttgcagtgggagcccaaactttccccagtgtgagtgctcccagcaagaaagtggcaaagcagatggccgcagaggaagccatgaaggccctgcatggggaggcgaccaactccatggcttctgataaccagcctgaaggtatgatctcagagtcacttgataacttggaatccatgatgcccaacaaggtcaggaagattggcgagctcgtgagatacctgaacaccaaccctgtgggtggccttttggagtacgcccgctcccatggctttgctgctgaattcaagttggtcgaccagtccggacctcctcacgagcccaagttcgtttaccaagcaaaagttgggggtcgctggttcccagccgtctgcgcacacagcaagaagcaaggcaagcaggaagcagcagatgcggctctccgtgtcttgattggggagaacgagaaggcagaacgcatgggtttcacagaggtaaccccagtgacaggggccagtctcagaagaactatgctcctcctctcaaggtccccagaagcacagccaaagacactccctctcactggcagcaccttccatgaccagatagccatgctgagccaccggtgcttcaacactctgactaacagcttccagccctccttgctcggccgcaagattctggccgccatcattatgaaaaaagactctgaggacatgggtgtcgtcgtcagcttgggaacagggaatcgctgtgtgaaaggagattctctcagcctaaaaggagaaactgtcaatgactgccatgcagaaataatctcccggagaggcttcatcaggtttctctacagtgagttaatgaaatacaactcccagactgcgaaggatagtatatttgaacctgctaagggaggagaaaagctccaaataaaaaagactgtgtcattccatctgtatatcagcactgctccgtgtggagatggcgccctctttgacaagtcctgcagcgaccgtgctatggaaagcacagaatcccgccactaccctgtcttcgagaatcccaaacaaggaaagctccgcaccaaggtggagaacggagaaggcacaatccctgtggaatccagtgacattgtgcctacgtgggatggcattcggctcggggagagactccgtaccatgtcctgtagtgacaaaatcctacgctggaacgtgctgggcctgcaaggggcactgttgacccacttcctgcagcccatttatctcaaatctgtcacattgggttaccttttcagccaagggcatctgacccgtgctatttgctgtcgtgtgacaagagatgggagtgcatttgaggatggactacgacatccctttattgtcaaccaccccaaggttggcagagtcagcatatatgattccaaaaggcaatccgggaagactaaggagacaagcgtcaactggtgtctggctgatggctatgacctggagatcctggacggtaccagaggcactgtggatgggccacggaatgaattgtcccgggtctccaaaaagaacatttttcttctatttaagaagctctgctccttccgttaccgcagggatctactgagactctcctatggtgaggccaagaaagctgcccgtgactacgagacggccaagaactacttcaaaaaaggcctgaaggatatgggctatgggaactggattagcaaaccccaggaggaaaagaacttttatctctgcccagtatag

SEQ ID NO: 57 - DNA, 10241 bp, Homo sapiens
  source 1..10241: mol_type = unassigned DNA
ccggcgtcggcggcgcgcgcgctccctcctctcggagagagggctgtggtaaaagccgtccggaaaatggccgccgccgccgccgccgcgccgagcggaggaggaggaggaggcgaggaggagagactgctccataaaaatacagactcaccagttcctgctttgatgtgacatgtgactccccagaatacaccttgcttctgtagaccagctccaacaggattccatggtagctgggatgttagggctcagggaagaaaagtcagaagaccaggacctccagggcctcaaggacaaacccctcaagtttaaaaaggtgaagaaagataagaaagaagagaaagagggcaagcatgagcccgtgcagccatcagcccaccactctgctgagcccgcagaggcaggcaaagcagagacatcagaagggtcaggctccgccccggctgtgccggaagcttctgcctcccccaaacagcggcgctccatcatccgtgaccggggacccatgtatgatgaccccaccctgcctgaaggctggacacggaagcttaagcaaaggaaatctggccgctctgctgggaagtatgatgtgtatttgatcaatccccagggaaaagcctttcgctctaaagtggagttgattgcgtacttcgaaaaggtaggcgacacatccctggaccctaatgattttgacttcacggtaactgggagagggagcccctcccggcgagagcagaaaccacctaagaagcccaaatctcccaaagctccaggaactggcagaggccggggacgccccaaagggagcggcaccacgagacccaaggcggccacgtcagagggtgtgcaggtgaaaagggtcctggagaaaagtcctgggaagctccttgtcaagatgccttttcaaacttcgccagggggcaaggctgaggggggtggggccaccacatccacccaggtcatggtgatcaaacgccccggcaggaagcgaaaagctgaggccgaccctcaggccattcccaagaaacggggccgaaagccggggagtgtggtggcagccgctgccgccgaggccaaaaagaaagccgtgaaggagtcttctatccgatctgtgcaggagaccgtactccccatcaagaagcgcaagacccgggagacggtcagcatcgaggtcaaggaagtggtgaagcccctgctggtgtccaccctcggtgagaagagcgggaaaggactgaagacctgtaagagccctgggcggaaaagcaaggagagcagccccaaggggcgcagcagcagcgcctcctcaccccccaagaaggagcaccaccaccatcaccaccactcagagtccccaaaggcccccgtgccactgctcccacccctgcccccacctccacctgagcccgagagctccgaggaccccaccagcccccctgagccccaggacttgagcagcagcgtctgcaaagaggagaagatgcccagaggaggctcactggagagcgacggctgccccaaggagccagctaagactcagcccgcggttgccaccgccgccacggccgcagaaaagtacaaacaccgaggggagggagagcgcaaagacattgtttcatcctccatgccaaggccaaacagagaggagcctgtggacagccggacgcccgtgaccgagagagttagctgactttacacggagcggattgcaaagcaaaccaacaagaataaaggcagctgttgtctcttctccttatgggtagggctctgacaaagcttcccgattaactgaaataaaaaatatttttttttctttcagtaaacttagagtttcgtggcttcagggtgggagtagttggagcattggggatgtttttcttaccgacaagcacagtcaggttgaagacctaaccagggccagaagtagctttgcacttttctaaactaggctccttcaacaaggcttgctgcagatactactgaccagacaagctgttgaccaggcacctcccctcccgcccaaacctttcccccatgtggtcgttagagacagagcgacagagcagttgagaggacactcccgttttcggtgccatcagtgccccgtctacagctcccccagctccccccacctcccccactcccaaccacgttgggacagggaggtgtgaggcaggagagacagttggattctttagagaagatggatatgaccagtggctatggcctgtgcgatcccacccgtggtggctcaagtctggccccacaccagccccaatccaaaactggcaaggacgcttcacaggacaggaaagtggcacctgtctgctccagctctggcatggctaggaggggggagtcccttgaactactgggtgtagactggcctgaaccacaggagaggatggcccagggtgaggtggcatggtccattctcaagggacgtcctccaacgggtggcgctagaggccatggaggcagtaggacaaggtgcaggcaggctggcctggggtcaggccgggcagagcacagcggggtgagagggattcctaatcactcagagcagtctgtgacttagtggacaggggagggggcaaagggggaggagaagaaaatgttcttccagttactttccaattctcctttagggacagcttagaattatttgcactattgagtcttcatgttcccacttcaaaacaaacagatgctctgagagcaaactggcttgaattggtgacatttagtccctcaagccaccagatgtgacagtgttgagaactacctggatttgtatatatacctgcgcttgttttaaagtgggctcagcacatagggttcccacgaagctccgaaactctaagtgtttgctgcaattttataaggacttcctgattggtttctcttctccccttccatttctgccttttgttcatttcatcctttcacttctttcccttcctccgtcctcctccttcctagttcatcccttctcttccaggcagccgcggtgcccaaccacacttgtcggctccagtccccagaactctgcctgccctttgtcctcctgctgccagtaccagccccaccctgttttgagccctgaggaggccttgggctctgctgagtccgacctggcctgtctgtgaagagcaagagagcagcaaggtcttgctctcctaggtagccccctcttccctggtaagaaaaagcaaaaggcatttcccaccctgaacaacgagccttttcacccttctactctagagaagtggactggaggagctgggcccgatttggtagttgaggaaagcacagaggcctcctgtggcctgccagtcatcgagtggcccaacaggggctccatgccagccgaccttgacctcactcagaagtccagagtctagcgtagtgcagcagggcagtagcggtaccaatgcagaactcccaagacccgagctgggaccagtacctgggtccccagcccttcctctgctcccccttttccctcggagttcttcttgaatggcaatgttttgcttttgctcgatgcagacagggggccagaacaccacacatttcactgtctgtctggtccatagctgtggtgtaggggcttagaggcatgggcttgctgtgggtttttaattgatcagttttcatgtgggatcccatctttttaacctctgttcaggaagtccttatctagctgcatatcttcatcatattggtatatccttttctgtgtttacagagatgtctcttatatctaaatctgtccaactgagaagtaccttatcaaagtagcaaatgagacagcagtcttatgcttccagaaacacccacaggcatgtcccatgtgagctgctgccatgaactgtcaagtgtgtgttgtcttgtgtatttcagttattgtccctggcttccttactatggtgtaatcatgaaggagtgaaacatcatagaaactgtctagcacttccttgccagtctttagtgatcaggaaccatagttgacagttccaatcagtagcttaagaaaaaaccgtgtttgtctcttctggaatggttagaagtgagggagtttgccccgttctgtttgtagagtctcatagttggactttctagcatatatgtgtccatttccttatgctgtaaaagcaagtcctgcaaccaaactcccatcagcccaatccctgatccctgatcccttccacctgctctgctgatgacccccccagcttcacttctgactcttccccaggaagggaaggggggtcagaagagagggtgagtcctccagaactcttcctccaaggacagaaggctcctgcccccatagtggcctcgaactcctggcactaccaaaggacacttatccacgagagcgcagcatccgaccaggttgtcactgagaagatgtttattttggtcagttgggtttttatgtattatacttagtcaaatgtaatgtggcttctggaatcattgtccagagctgcttccccgtcacctgggcgtcatctggtcctggtaagaggagtgcgtggcccaccaggcccccctgtcacccatgacagttcattcagggccgatggggcagtcgtggttgggaacacagcatttcaagcgtcactttatttcattcgggccccacctgcagctccctcaaagaggcagttgcccagcctctttcccttccagtttattccagagctgccagtggggcctgaggctccttagggttttctctctatttccccctttcttcctcattccctcgtctttcccaaaggcatcacgagtcagtcgcctttcagcaggcagccttggcggtttatcgccctggcaggcaggggccctgcagctctcatgctgcccctgccttggggtcaggttgacaggaggttggagggaaagccttaagctgcaggattctcaccagctgtgtccggcccagttttggggtgtgacctcaatttcaattttgtctgtacttgaacattatgaagatgggggcctctttcagtgaatttgtgaacagcagaattgaccgacagctttccagtacccatggggctaggtcattaaggccacatccacagtctcccccacccttgttccagttgttagttactacctcctctcctgacaatactgtatgtcgtcgagctccccccaggtctacccctcccggccctgcctgctggtgggcttgtcatagccagtgggattgccggtcttgacagctcagtgagctggagatacttggtcacagccaggcgctagcacagctcccttctgttgatgctgtattcccatatcaaaagacacaggggacacccagaaacgccacatcccccaatccatcagtgccaaactagccaacggccccagcttctcagctcgctggatggcggaagctgctactcgtgagcgccagtgcgggtgcagacaatcttctgttgggtggcatcattccaggcccgaagcatgaacagtgcacctgggacagggagcagccccaaattgtcacctgcttctctgcccagcttttcattgctgtgacagtgatggcgaaagagggtaataaccagacacaaactgccaagttgggtggagaaaggagtttctttagctgacagaatctctgaattttaaatcacttagtaagcggctcaagcccaggagggagcagagggatacgagcggagtcccctgcgcgggaccatctggaattggtttagcccaagtggagcctgacagccagaactctgtgtcccccgtctaaccacagctccttttccagagcattccagtcaggctctctgggctgactgggccaggggaggttacaggtaccagttctttaagaagatctttgggcatatacatttttagcctgtgtcattgccccaaatggattcctgtttcaagttcacacctgcagattctaggacctgtgtcctagacttcagggagtcagctgtttctagagttcctaccatggagtgggtctggaggacctgcccggtgggggggcagagccctgctccctccgggtcttcctactcttctctctgctctgacgggatttgttgattctctccattttggtgtctttctcttttagatattgtatcaatctttagaaaaggcatagtctacttgttataaatcgttaggatactgcctcccccagggtctaaaattacatattagaggggaaaagctgaacactgaagtcagttctcaacaatttagaaggaaaacctagaaaacatttggcagaaaattacatttcgatgtttttgaatgaatacgagcaagcttttacaacagtgctgatctaaaaatacttagcacttggcctgagatgcctggtgagcattacaggcaaggggaatctggaggtagccgacctgaggacatggcttctgaacctgtcttttgggagtggtatggaaggtggagcgttcaccagtgacctggaaggcccagcaccaccctccttcccactcttctcatcttgacagagcctgccccagcgctgacgtgtcaggaaaacacccagggaactaggaaggcacttctgcctgaggggcagcctgccttgcccactcctgctctgctcgcctcggatcagctgagccttctgagctggcctctcactgcctccccaaggccccctgcctgccctgtcaggaggcagaaggaagcaggtgtgagggcagtgcaaggagggagcacaacccccagctcccgctccgggctccgacttgtgcacaggcagagcccagaccctggaggaaatcctacctttgaattcaagaacatttggggaatttggaaatctctttgcccccaaacccccattctgtcctacctttaatcaggtcctgctcagcagtgagagcagatgaggtgaaaaggccaagaggtttggctcctgcccactgatagcccctctccccgcagtgtttgtgtgtcaagtggcaaagctgttcttcctggtgaccctgattatatccagtaacacatagactgtgcgcataggcctgctttgtctcctctatcctgggcttttgttttgctttttagttttgcttttagtttttctgtcccttttatttaacgcaccgactagacacacaaagcagttgaatttttatatatatatctgtatattgcacaattataaactcattttgcttgtggctccacacacacaaaaaaagacctgttaaaattatacctgttgcttaattacaatatttctgataaccatagcataggacaagggaaaataaaaaaagaaaaaaaagaaaaaaaaacgacaaatctgtctgctggtcacttcttctgtccaagcagattcgtggtcttttcctcgcttctttcaagggctttcctgtgccaggtgaaggaggctccaggcagcacccaggttttgcactcttgtttctcccgtgcttgtgaaagaggtcccaaggttctgggtgcaggagcgctcccttgacctgctgaagtccggaacgtagtcggcacagcctggtcgccttccacctctgggagctggagtccactggggtggcctgactcccccagtccccttcccgtgacctggtcagggtgagcccatgtggagtcagcctcgcaggcctccctgccagtagggtccgagtgtgtttcatccttcccactctgtcgagcctgggggctggagcggagacgggaggcctggcctgtctcggaacctgtgagctgcaccaggtagaacgccagggaccccagaatcatgtgcgtcagtccaaggggtcccctccaggagtagtgaagactccagaaatgtccctttcttctcccccatcctacgagtaattgcatttgcttttgtaattcttaatgagcaatatctgctagagagtttagctgtaacagttctttttgatcatctttttttaataattagaaacaccaaaaaaatccagaaacttgttcttccaaagcagagagcattataatcaccagggccaaaagcttccctccctgctgtcattgcttcttctgaggcctgaatccaaaagaaaaacagccataggccctttcagtggccgggctacccgtgagcccttcggaggaccagggctggggcagcctctgggcccacatccggggccagctccggcgtgtgttcagtgttagcagtgggtcatgatgctctttcccacccagcctgggataggggcagaggaggcgaggaggccgttgccgctgatgtttggccgtgaacaggtgggtgtctgcgtgcgtccacgtgcgtgttttctgactgacatgaaatcgacgcccgagttagcctcacccggtgacctctagccctgcccggatggagcggggcccacccggttcagtgtttctggggagctggacagtggagtgcaaaaggcttgcagaacttgaagcctgctccttcccttgctaccacggcctcctttccgtttgatttgtcactgcttcaatcaataacagccgctccagagtcagtagtcaatgaatatatgaccaaatatcaccaggactgttactcaatgtgtgccgagcccttgcccatgctgggctcccgtgtatctggacactgtaacgtgtgctgtgtttgctccccttccccttccttctttgccctttacttgtctttctggggtttttctgtttgggtttggtttggtttttatttctccttttgtgttccaaacatgaggttctctctactggtcctcttaactgtggtgttgaggcttatatttgtgtaatttttggtgggtgaaaggaattttgctaagtaaatctcttctgtgtttgaactgaagtctgtattgtaactatgtttaaagtaattgttccagagacaaatatttctagacactttttctttacaaacaaaagcattcggagggagggggatggtgactgagatgagaggggagagctgaacagatgacccctgcccagatcagccagaagccacccaaagcagtggagcccaggagtcccactccaagccagcaagccgaatagctgatgtgttgccactttccaagtcactgcaaaaccaggttttgttccgcccagtggattcttgttttgcttcccctccccccgagattattaccaccatcccgtgcttttaaggaaaggcaagattgatgtttccttgaggggagccaggaggggatgtgtgtgtgcagagctgaagagctggggagaatggggctgggcccacccaagcaggaggctgggacgctctgctgtgggcacaggtcaggctaatgttggcagatgcagctcttcctggacaggccaggtggtgggcattctctctccaaggtgtgccccgtgggcattactgtttaagacacttccgtcacatcccaccccatcctccagggctcaacactgtgacatctctattccccaccctccccttcccagggcaataaaatgaccatggagggggcttgcactctcttggctgtcacccgatcgccagcaaaacttagatgtgagaaaaccccttcccattccatggcgaaaacatctccttagaaaagccattaccctcattaggcatggttttgggctcccaaaacacctgacagcccctccctcctctgagaggcggagagtgctgactgtagtgaccattgcatgccgggtgcagcatctggaagagctaggcagggtgtctgccccctcctgagttgaagtcatgctcccctgtgccagcccagaggccgagagctatggacagcattgccagtaacacaggccaccctgtgcagaagggagctggctccagcctggaaacctgtctgaggttgggagaggtgcacttggggcacagggagaggccgggacacacttagctggagatgtctctaaaagccctgtatcgtattcaccttcagtttttgtgttttgggacaattactttagaaaataagtaggtcgttttaaaaacaaaaattattgattgcttttttgtagtgttcagaaaaaaggttctttgtgtatagccaaatgactgaaagcactgatatatttaaaaacaaaaggcaatttattaaggaaatttgtaccatttcagtaaacctgtctgaatgtacctgtatacgtttcaaaaacaccccccccccactgaatccctgtaacctatttattatataaagagtttgccttataaattt

SEQ ID NO: 58 - DNA, 1488 bp, Homo sapiens
  source 1..1488: mol_type = unassigned DNA
atgtacccatacgacgtcccagactacgctgtagctgggatgttagggctcagggaagaaaagtcagaagaccaggacctccagggcctcaaggacaaacccctcaagtttaaaaaggtgaagaaagataagaaagaagagaaagagggcaagcatgagcccgtgcagccatcagcccaccactctgctgagcccgcagaggcaggcaaagcagagacatcagaagggtcaggctccgccccggctgtgccggaagcttctgcctcccccaaacagcggcgctccatcatccgtgaccggggacccatgtatgatgaccccaccctgcctgaaggctggacacggaagcttaagcaaaggaaatctggccgctctgctgggaagtatgatgtgtatttgatcaatccccagggaaaagcctttcgctctaaagtggagttgattgcgtacttcgaaaaggtaggcgacacatccctggaccctaatgattttgacttcacggtaactgggagagggagcccctcccggcgagagcagaaaccacctaagaagcccaaatctcccaaagctccaggaactggcagaggccggggacgccccaaagggagcggcaccacgagacccaaggcggccacgtcagagggtgtgcaggtgaaaagggtcctggagaaaagtcctgggaagctccttgtcaagatgccttttcaaacttcgccagggggcaaggctgaggggggtggggccaccacatccacccaggtcatggtgatcaaacgccccggcaggaagtgaaaagctgaggccgaccctcaggccattcccaagaaacggggccgaaagccggggagtgtggtggcagccgctgccgccgaggccaaaaagaaagccgtgaaggagtcttctatccgatctgtgcaggagaccgtactccccatcaagaagcgcaagacccgggagacggtcagcatcgaggtcaaggaagtggtgaagcccctgctggtgtccaccctcggtgagaagagcgggaaaggactgaagacctgtaagagccctgggcggaaaagcaaggagagcagccccaaggggcgcagcagcagcgcctcctcaccccccaagaaggagcaccaccaccatcaccaccactcagagtccccaaaggcccccgtgccactgctcccacccctgcccccacctccacctgagcccgagagctccgaggaccccaccagcccccctgagccccaggacttgagcagcagcgtctgcaaagaggagaagatgcccagaggaggctcactggagagcgacggctgccccaaggagccagctaagactcagcccgcggttgccaccgccgccacggccgcagaaaagtacaaacaccgaggggagggagagcgcaaagacattgtttcatcctccatgccaaggccaaacagagaggagcctgtggacagccggacgcccgtgaccgagagagttagctga

SEQ ID NO: 59 - DNA, 1488 bp, Homo sapiens
  source 1..1488: mol_type = unassigned DNA
atgtacccatacgacgtcccagactacgctgtagctgggatgttagggctcagggaagaaaagtcagaagaccaggacctccagggcctcaaggacaaacccctcaagtttaaaaaggtgaagaaagataagaaagaagagaaagagggcaagcatgagcccgtgcagccatcagcccaccactctgctgagcccgcagaggcaggcaaagcagagacatcagaagggtcaggctccgccccggctgtgccggaagcttctgcctcccccaaacagcggcgctccatcatccgtgaccggggacccatgtatgatgaccccaccctgcctgaaggctggacacggaagcttaagcaaaggaaatctggccgctctgctgggaagtatgatgtgtatttgatcaatccccagggaaaagcctttcgctctaaagtggagttgattgcgtacttcgaaaaggtaggcgacacatccctggaccctaatgattttgacttcacggtaactgggagagggagcccctcccggcgagagcagaaaccacctaagaagcccaaatctcccaaagctccaggaactggcagaggccggggacgccccaaagggagcggcaccacgagacccaaggcggccacgtcagagggtgtgcaggtgaaaagggtcctggagaaaagtcctgggaagctccttgtcaagatgccttttcaaacttcgccagggggcaaggctgaggggggtggggccaccacatccacccaggtcatggtgatcaaacgccccggcaggaagcgaaaagctgaggccgaccctcaggccattcccaagaaacggggccgaaagccggggagtgtggtggcagccgctgccgccgaggccaaaaagaaagccgtgaaggagtcttctatctgatctgtgcaggagaccgtactccccatcaagaagcgcaagacccgggagacggtcagcatcgaggtcaaggaagtggtgaagcccctgctggtgtccaccctcggtgagaagagcgggaaaggactgaagacctgtaagagccctgggcggaaaagcaaggagagcagccccaaggggcgcagcagcagcgcctcctcaccccccaagaaggagcaccaccaccatcaccaccactcagagtccccaaaggcccccgtgccactgctcccacccctgcccccacctccacctgagcccgagagctccgaggaccccaccagcccccctgagccccaggacttgagcagcagcgtctgcaaagaggagaagatgcccagaggaggctcactggagagcgacggctgccccaaggagccagctaagactcagcccgcggttgccaccgccgccacggccgcagaaaagtacaaacaccgaggggagggagagcgcaaagacattgtttcatcctccatgccaaggccaaacagagaggagcctgtggacagccggacgcccgtgaccgagagagttagctga

SEQ ID NO: 60 - DNA, 22 bp, synthetic construct
  source 1..22: mol_type = other DNA; note = Description of Artificial Sequence: Synthetic primer
agatgcctttccaagcatcgcc

SEQ ID NO: 61 - DNA, 20 bp, synthetic construct
  source 1..20: mol_type = other DNA; note = Description of Artificial Sequence: Synthetic primer
tggacaccagcaggggcttc

SEQ ID NO: 62 - DNA, 63 bp, synthetic construct
  source 1..63: mol_type = other DNA; note = Description of Artificial Sequence: Synthetic oligonucleotide; note = Description of Combined DNA/RNA Molecule: Synthetic oligonucleotide
  modified_base 1: mod_base = OTHER; note = 2'-O-methylguanosine phosphorothioate
  modified_base 2: mod_base = OTHER; note = 2'-O-methyluridine phosphorothioate
  modified_base 3: mod_base = OTHER; note = 2'-O-methylguanosine phosphorothioate
  modified_base 4: mod_base = OTHER; note = 2'-O-methylguanosine phosphorothioate
  modified_base 5: mod_base = OTHER; note = 2'-O-methyladenosine
  modified_base 6: mod_base = OTHER; note = 2'-O-methyladenosine
  modified_base 7: mod_base = OTHER; note = 2'-O-methyluridine
  modified_base 8: mod_base = OTHER; note = 2'-O-methyladenosine
  modified_base 9: mod_base = OTHER; note = 2'-O-methylguanosine
  modified_base 10: mod_base = OTHER; note = 2'-O-methyluridine
  modified_base 11: mod_base = OTHER; note = 2'-O-methyladenosine
  modified_base 12: mod_base = OTHER; note = 2'-O-methyluridine
  modified_base 13: mod_base = OTHER; note = 2'-O-methyladenosine
  modified_base 14: mod_base = OTHER; note = 2'-O-methyladenosine
  modified_base 15: mod_base = OTHER; note = 2'-O-methylcytidine
  modified_base 16: mod_base = OTHER; note = 2'-O-methyladenosine
  modified_base 17: mod_base = OTHER; note = 2'-O-methyladenosine
  modified_base 18: mod_base = OTHER; note = 2'-O-methyluridine
  modified_base 19: mod_base = OTHER; note = 2'-O-methyladenosine
  modified_base 20: mod_base = OTHER; note = 2'-O-methyluridine
  modified_base 21: mod_base = OTHER; note = 2'-O-methylguanosine
  modified_base 22: mod_base = OTHER; note = 2'-O-methylcytidine
  modified_base 23: mod_base = OTHER; note = 2'-O-methyluridine
  modified_base 24: mod_base = OTHER; note = 2'-O-methyladenosine
  modified_base 25: mod_base = OTHER; note = 2'-O-methyladenosine
  modified_base 26: mod_base = OTHER; note = 2'-O-methyladenosine
  modified_base 27: mod_base = OTHER; note = 2'-O-methyluridine
  modified_base 28: mod_base = OTHER; note = 2'-O-methylguanosine
  modified_base 29: mod_base = OTHER; note = 2'-O-methyluridine
  modified_base 30: mod_base = OTHER; note = 2'-O-methyluridine
  modified_base 31: mod_base = OTHER; note = 2'-O-methylguanosine
  modified_base 32: mod_base = OTHER; note = 2'-O-methyluridine
  modified_base 33: mod_base = OTHER; note = 2'-O-methyluridine
  modified_base 34: mod_base = OTHER; note = 2'-O-methyladenosine
  modified_base 35: mod_base = OTHER; note = 2'-O-methyluridine
  modified_base 36: mod_base = OTHER; note = 2'-O-methyladenosine
  modified_base 37: mod_base = OTHER; note = 2'-O-methylguanosine
  modified_base 38: mod_base = OTHER; note = 2'-O-methyluridine
  modified_base 39: mod_base = OTHER; note = 2'-O-methyladenosine
  modified_base 40: mod_base = OTHER; note = 2'-O-methyluridine
  modified_base 41: mod_base = OTHER; note = 2'-O-methylcytidine
  modified_base 42: mod_base = OTHER; note = 2'-O-methylcytidine
  modified_base 43: mod_base = OTHER; note = 2'-O-methylcytidine
  modified_base 44: mod_base = OTHER; note = 2'-O-methyladenosine
  modified_base 45: mod_base = OTHER; note = 2'-O-methylcytidine
  modified_base 46: mod_base = OTHER; note = 2'-O-methylcytidine
  modified_base 47: mod_base = OTHER; note = 2'-O-methyladenosine
  modified_base 48: mod_base = OTHER; note = 2'-O-methylguanosine
  modified_base 49: mod_base = OTHER; note = 2'-O-methylcytidine
  modified_base 50: mod_base = OTHER; note = 2'-O-methyluridine
  modified_base 51: mod_base = OTHER; note = 2'-O-methyluridine
  modified_base 55: mod_base = OTHER; note = 2'-O-methyladenosine
  modified_base 56: mod_base = OTHER; note = 2'-O-methylcytidine
  modified_base 57: mod_base = OTHER; note = 2'-O-methyluridine
  modified_base 58: mod_base = OTHER; note = 2'-O-methyluridine
  modified_base 59: mod_base = OTHER; note = 2'-O-methylcytidine phosphorothioate
  modified_base 60: mod_base = OTHER; note = 2'-O-methylcytidine phosphorothioate
  modified_base 61: mod_base = OTHER; note = 2'-O-methyluridine phosphorothioate
  modified_base 62: mod_base = OTHER; note = 2'-O-methylguanosine phosphorothioate
  modified_base 63: mod_base = OTHER; note = 2'-O-methylcytidine
  misc_feature 1..51: note = RNA
  misc_feature 52..54: note = DNA
  misc_feature 55..63: note = RNA
gtggaatagtataacaatatgctaaatgttgttatagtatcccaccagctttccacttcctgc

SEQ ID NO: 63 - DNA, 65 bp, synthetic construct
  source 1..65: mol_type = other DNA; note = Description of Artificial Sequence: Synthetic oligonucleotide; note = Description of Combined DNA/RNA Molecule: Synthetic oligonucleotide
  modified_base 1: mod_base = OTHER; note = 2'-O-methylguanosine phosphorothioate
  modified_base 2: mod_base = OTHER; note = 2'-O-methyluridine phosphorothioate
  modified_base 3: mod_base = OTHER; note = 2'-O-methylguanosine phosphorothioate
  modified_base 4: mod_base = OTHER; note = 2'-O-methylguanosine phosphorothioate
  modified_base 5: mod_base = OTHER; note = 2'-O-methyladenosine
  modified_base 6: mod_base = OTHER; note = 2'-O-methyladenosine
  modified_base 7: mod_base = OTHER; note = 2'-O-methyluridine
  modified_base 8: mod_base = OTHER; note = 2'-O-methyladenosine
  modified_base 9: mod_base = OTHER; note = 2'-O-methylguanosine
  modified_base 10: mod_base = OTHER; note = 2'-O-methyluridine
  modified_base 11: mod_base = OTHER; note = 2'-O-methyladenosine
  modified_base 12: mod_base = OTHER; note = 2'-O-methyluridine
  modified_base 13: mod_base = OTHER; note = 2'-O-methyladenosine
  modified_base 14: mod_base = OTHER; note = 2'-O-methyladenosine
  modified_base 15: mod_base = OTHER; note = 2'-O-methylcytidine
  modified_base 16: mod_base = OTHER; note = 2'-O-methyladenosine
  modified_base 17: mod_base = OTHER; note = 2'-O-methyladenosine
  modified_base 18: mod_base = OTHER; note = 2'-O-methyluridine
  modified_base 19: mod_base = OTHER; note = 2'-O-methyladenosine
  modified_base 20: mod_base = OTHER; note = 2'-O-methyluridine
  modified_base 21: mod_base = OTHER; note = 2'-O-methylguanosine
  modified_base 22: mod_base = OTHER; note = 2'-O-methylcytidine
  modified_base 23: mod_base = OTHER; note = 2'-O-methyluridine
  modified_base 24: mod_base = OTHER; note = 2'-O-methyladenosine
  modified_base 25: mod_base = OTHER; note = 2'-O-methyladenosine
  modified_base 26: mod_base = OTHER; note = 2'-O-methyladenosine
  modified_base 27: mod_base = OTHER; note = 2'-O-methyluridine
  modified_base 28: mod_base = OTHER; note = 2'-O-methylguanosine
  modified_base 29: mod_base = OTHER; note = 2'-O-methyluridine
  modified_base 30: mod_base = OTHER; note = 2'-O-methyluridine
  modified_base 31: mod_base = OTHER; note = 2'-O-methylguanosine
  modified_base 32: mod_base = OTHER; note = 2'-O-methyluridine
  modified_base 33: mod_base = OTHER; note = 2'-O-methyluridine
  modified_base 34: mod_base = OTHER; note = 2'-O-methyladenosine
  modified_base 35: mod_base = OTHER; note = 2'-O-methyluridine
  modified_base 36: mod_base = OTHER; note = 2'-O-methyladenosine
  modified_base 37: mod_base = OTHER; note = 2'-O-methylguanosine
  modified_base 38: mod_base = OTHER; note = 2'-O-methyluridine
  modified_base 39: mod_base = OTHER; note = 2'-O-methyladenosine
  modified_base 40: mod_base = OTHER; note = 2'-O-methyluridine
  modified_base 41: mod_base = OTHER; note = 2'-O-methylcytidine
  modified_base 42: mod_base = OTHER; note = 2'-O-methylcytidine
  modified_base 43: mod_base = OTHER; note = 2'-O-methylcytidine
  modified_base 44: mod_base = OTHER; note = 2'-O-methyladenosine
  modified_base 45: mod_base = OTHER; note = 2'-O-methylcytidine
  modified_base 46: mod_base = OTHER; note = 2'-O-methylcytidine
  modified_base 47: mod_base = OTHER; note = 2'-O-methyladenosine
  modified_base 48: mod_base = OTHER; note = 2'-O-methylguanosine
  modified_base 49: mod_base = OTHER; note = 2'-O-methylcytidine
  modified_base 50: mod_base = OTHER; note = 2'-O-methyluridine
  modified_base 51: mod_base = OTHER; note = 2'-O-methyluridine
  modified_base 55: mod_base = OTHER; note = 2'-O-methyladenosine
  modified_base 56: mod_base = OTHER; note = 2'-O-methylcytidine
  modified_base 57: mod_base = OTHER; note = 2'-O-methyluridine
  modified_base 58: mod_base = OTHER; note = 2'-O-methyluridine
  modified_base 59: mod_base = OTHER; note = 2'-O-methylcytidine
  modified_base 60: mod_base = OTHER; note = 2'-O-methylcytidine
  modified_base 61: mod_base = OTHER; note = 2'-O-methyluridine phosphorothioate
  modified_base 62: mod_base = OTHER; note = Guanosine phosphorothioate
  modified_base 63: mod_base = OTHER; note = 2'-O-methylcytidine phosphorothioate
  modified_base 64: mod_base = OTHER; note = 2'-O-methylcytidine phosphorothioate
  modified_base 65: mod_base = OTHER; note = 2'-O-methylguanosine
  misc_feature 1..51: note = RNA
  misc_feature 52..54: note = DNA
  misc_feature 55..61: note = RNA
  misc_feature 62: note = DNA
  misc_feature 63..65: note = RNA
gtggaatagtataacaatatgctaaatgttgttatagtatcccaccagctttccacttcctgccg

SEQ ID NO: 64 - DNA, 63 bp, synthetic construct
  source 1..63: mol_type = other DNA; note = Description of Artificial Sequence: Synthetic oligonucleotide; note = Description of Combined DNA/RNA Molecule: Synthetic oligonucleotide
  modified_base 1: mod_base = OTHER; note = 2'-O-methylguanosine phosphorothioate
  modified_base 2: mod_base = OTHER; note = 2'-O-methylguanosine phosphorothioate
  modified_base 3: mod_base = OTHER; note = 2'-O-methyluridine phosphorothioate
  modified_base 4: mod_base = OTHER; note = 2'-O-methylguanosine phosphorothioate
  modified_base 5: mod_base = OTHER; note = 2'-O-methyladenosine
  modified_base 6: mod_base = OTHER; note = 2'-O-methyladenosine
  modified_base 7: mod_base = OTHER; note = 2'-O-methylguanosine
  modified_base 8: mod_base = OTHER; note = 2'-O-methyladenosine
  modified_base 9: mod_base = OTHER; note = 2'-O-methylguanosine
  modified_base 10: mod_base = OTHER; note = 2'-O-methylguanosine
  modified_base 11: mod_base = OTHER; note = 2'-O-methyladenosine
  modified_base 12: mod_base = OTHER; note = 2'-O-methylguanosine
  modified_base 13: mod_base = OTHER; note = 2'-O-methyladenosine
  modified_base 14: mod_base = OTHER; note = 2'-O-methyladenosine
  modified_base 15: mod_base = OTHER; note = 2'-O-methylcytidine
  modified_base 16: mod_base = OTHER; note = 2'-O-methyladenosine
  modified_base 17: mod_base = OTHER; note = 2'-O-methyladenosine
  modified_base 18: mod_base = OTHER; note = 2'-O-methyluridine
  modified_base 19: mod_base = OTHER; note = 2'-O-methyladenosine
  modified_base 20: mod_base = OTHER; note = 2'-O-methyluridine
  modified_base 21: mod_base = OTHER; note = 2'-O-methylguanosine
  modified_base 22: mod_base = OTHER; note = 2'-O-methylcytidine
  modified_base 23: mod_base = OTHER; note = 2'-O-methyluridine
  modified_base 24: mod_base = OTHER; note = 2'-O-methyladenosine
  modified_base 25: mod_base = OTHER; note = 2'-O-methyladenosine
  modified_base 26: mod_base = OTHER; note = 2'-O-methyladenosine
  modified_base 27: mod_base = OTHER; note = 2'-O-methyluridine
  modified_base 28: mod_base = OTHER; note = 2'-O-methylguanosine
  modified_base 29: mod_base = OTHER; note = 2'-O-methyluridine
  modified_base 30: mod_base = OTHER; note = 2'-O-methyluridine
  modified_base 31: mod_base = OTHER; note = 2'-O-methylguanosine
  modified_base 32: mod_base = OTHER; note = 2'-O-methyluridine
  modified_base 33: mod_base = OTHER; note = 2'-O-methyluridine
  modified_base 34: mod_base = OTHER; note = 2'-O-methylcytidine
  modified_base 35: mod_base = OTHER; note = 2'-O-methyluridine
  modified_base 36: mod_base = OTHER; note = 2'-O-methylcytidine
  modified_base 37: mod_base = OTHER; note = 2'-O-methylguanosine
  modified_base 38: mod_base = OTHER; note = 2'-O-methyluridine
  modified_base 39: mod_base = OTHER; note = 2'-O-methylcytidine
  modified_base 40: mod_base = OTHER; note = 2'-O-methyluridine
  modified_base 41: mod_base = OTHER; note = 2'-O-methylcytidine
  modified_base 42: mod_base = OTHER; note = 2'-O-methylcytidine
  modified_base 43: mod_base = OTHER; note = 2'-O-methyladenosine
  modified_base 44: mod_base = OTHER; note = 2'-O-methylcytidine
  modified_base 45: mod_base = OTHER; note = 2'-O-methylcytidine
  modified_base 46: mod_base = OTHER; note = 2'-O-methylcytidine
  modified_base 47: mod_base = OTHER; note = 2'-O-methyladenosine
  modified_base 48: mod_base = OTHER; note = 2'-O-methylguanosine
  modified_base 49: mod_base = OTHER; note = 2'-O-methylcytidine
  modified_base 50: mod_base = OTHER; note = 2'-O-methyluridine
  modified_base 51: mod_base = OTHER; note = 2'-O-methyluridine
  modified_base 55: mod_base = OTHER; note = 2'-O-methyladenosine
  modified_base 56: mod_base = OTHER; note = 2'-O-methylcytidine
  modified_base 57: mod_base = OTHER; note = 2'-O-methyluridine
  modified_base 58: mod_base = OTHER; note = 2'-O-methyluridine
  modified_base 59: mod_base = OTHER; note = 2'-O-methylcytidine phosphorothioate
  modified_base 60: mod_base = OTHER; note = 2'-O-methylcytidine phosphorothioate
  modified_base 61: mod_base = OTHER; note = 2'-O-methyluridine phosphorothioate
  modified_base 62: mod_base = OTHER; note = 2'-O-methylguanosine phosphorothioate
  modified_base 63: mod_base = OTHER; note = 2'-O-methylcytidine
  misc_feature 1..51: note = RNA
  misc_feature 52..54: note = DNA
  misc_feature 55..63: note = RNA
ggtgaagaggagaacaatatgctaaatgttgttctcgtctccacccagctttccacttcctgc

SEQ ID NO: 65 - DNA, 73 bp, synthetic construct
  source 1..73: mol_type = other DNA; note = Description of Artificial Sequence: Synthetic oligonucleotide; note = Description of Combined DNA/RNA Molecule: Synthetic oligonucleotide
  modified_base 1: mod_base = OTHER; note = 2'-O-methylguanosine phosphorothioate
  modified_base 2: mod_base = OTHER; note = 2'-O-methylguanosine phosphorothioate
  modified_base 3: mod_base = OTHER; note = 2'-O-methyluridine phosphorothioate
  modified_base 4: mod_base = OTHER; note = 2'-O-methylguanosine phosphorothioate
  modified_base 5: mod_base = OTHER; note = 2'-O-methyluridine
  modified_base 6: mod_base = OTHER; note = 2'-O-methylcytidine
  modified_base 7: mod_base = OTHER; note = 2'-O-methylguanosine
  modified_base 8: mod_base = OTHER; note = 2'-O-methyladenosine
  modified_base 9: mod_base = OTHER; note = 2'-O-methylguanosine
  modified_base 10: mod_base = OTHER; note = 2'-O-methyladenosine
  modified_base 11: mod_base = OTHER; note = 2'-O-methyladenosine
  modified_base 12: mod_base = OTHER; note = 2'-O-methylguanosine
  modified_base 13: mod_base = OTHER; note = 2'-O-methyladenosine
  modified_base 14: mod_base = OTHER; note = 2'-O-methylguanosine
  modified_base 15: mod_base = OTHER; note = 2'-O-methylguanosine
  modified_base 16: mod_base = OTHER; note = 2'-O-methyladenosine
  modified_base 17: mod_base = OTHER; note = 2'-O-methylguanosine
  modified_base 18: mod_base = OTHER; note = 2'-O-methyladenosine
  modified_base 19: mod_base = OTHER; note = 2'-O-methyladenosine
  modified_base 20: mod_base = OTHER; note = 2'-O-methylcytidine
  modified_base 21: mod_base = OTHER; note = 2'-O-methyladenosine
  modified_base 22: mod_base = OTHER; note = 2'-O-methyladenosine
  modified_base 23: mod_base = OTHER; note = 2'-O-methyluridine
  modified_base 24: mod_base = OTHER; note = 2'-O-methyladenosine
  modified_base 25: mod_base = OTHER; note = 2'-O-methyluridine
  modified_base 26: mod_base = OTHER; note = 2'-O-methylguanosine
  modified_base 27: mod_base = OTHER; note = 2'-O-methylcytidine
  modified_base 28: mod_base = OTHER; note = 2'-O-methyluridine
  modified_base 29: mod_base = OTHER; note = 2'-O-methyladenosine
  modified_base 30: mod_base = OTHER; note = 2'-O-methyladenosine
  modified_base 31: mod_base = OTHER; note = 2'-O-methyladenosine
  modified_base 32: mod_base = OTHER; note = 2'-O-methyluridine
  modified_base 33: mod_base = OTHER; note = 2'-O-methylguanosine
  modified_base 34: mod_base = OTHER; note = 2'-O-methyluridine
  modified_base 35: mod_base = OTHER; note = 2'-O-methyluridine
  modified_base 36: mod_base = OTHER; note = 2'-O-methylguanosine
  modified_base 37: mod_base = OTHER; note = 2'-O-methyluridine
  modified_base 38: mod_base = OTHER; note = 2'-O-methyluridine
  modified_base 39: mod_base = OTHER; note = 2'-O-methylcytidine
  modified_base 40: mod_base = OTHER; note = 2'-O-methyluridine
  modified_base 41: mod_base = OTHER; note = 2'-O-methylcytidine
  modified_base 42: mod_base = OTHER; note = 2'-O-methylguanosine
  modified_base 43: mod_base = OTHER; note = 2'-O-methyluridine
  modified_base 44: mod_base = OTHER; note = 2'-O-methylcytidine
  modified_base 45: mod_base = OTHER; note = 2'-O-methyluridine
  modified_base 46: mod_base = OTHER; note = 2'-O-methylcytidine
  modified_base 47: mod_base = OTHER; note = 2'-O-methylcytidine
  modified_base 48: mod_base = OTHER; note = 2'-O-methyluridine
  modified_base 49: mod_base = OTHER; note = 2'-O-methylcytidine
  modified_base 50: mod_base = OTHER; note = 2'-O-methylguanosine
  modified_base 51: mod_base = OTHER; note = 2'-O-methyladenosine
  modified_base 52: mod_base = OTHER; note = 2'-O-methylcytidine
  modified_base 53: mod_base = OTHER; note = 2'-O-methyladenosine
  modified_base 54: mod_base = OTHER; note = 2'-O-methylcytidine
  modified_base 55: mod_base = OTHER; note = 2'-O-methylcytidine
  modified_base 56: mod_base = OTHER; note = 2'-O-methylcytidine
  modified_base 57: mod_base = OTHER; note = 2'-O-methyladenosine
  modified_base 58: mod_base = OTHER; note = 2'-O-methylguanosine
  modified_base 59: mod_base = OTHER; note = 2'-O-methylcytidine
  modified_base 60: mod_base = OTHER; note = 2'-O-methyluridine
  modified_base 61: mod_base = OTHER; note = 2'-O-methyluridine
  modified_base 65: mod_base = OTHER; note = 2'-O-methyladenosine
  modified_base 66: mod_base = OTHER; note = 2'-O-methylcytidine
  modified_base 67: mod_base = OTHER; note = 2'-O-methyluridine
  modified_base 68: mod_base = OTHER; note = 2'-O-methyluridine
  modified_base 69: mod_base = OTHER; note = 2'-O-methylcytidine phosphorothioate
  modified_base 70: mod_base = OTHER; note = 2'-O-methylcytidine phosphorothioate
  modified_base 71: mod_base = OTHER; note = 2'-O-methyluridine phosphorothioate
  modified_base 72: mod_base = OTHER; note = 2'-O-methylguanosine phosphorothioate
  modified_base 73: mod_base = OTHER; note = 2'-O-methylcytidine
  misc_feature 1..61: note = RNA
  misc_feature 62..64: note = DNA
  misc_feature 65..73: note = RNA
ggtgtcgagaagaggagaacaatatgctaaatgttgttctcgtctcctcgacacccagctttccacttcctgc

SEQ ID NO: 66 - DNA, 50 bp, synthetic construct
  source 1..50: mol_type = other DNA; note = Description of Artificial Sequence: Synthetic oligonucleotide; note = Description of Combined DNA/RNA Molecule: Synthetic oligonucleotide
  modified_base 1: mod_base = OTHER; note = 2'-O-methyluridine phosphorothioate
  modified_base 2: mod_base = OTHER; note = 2'-O-methyluridine phosphorothioate
  modified_base 3: mod_base = OTHER; note = 2'-O-methyluridine phosphorothioate
  modified_base 4: mod_base = OTHER; note = 2'-O-methylcytidine phosphorothioate
  modified_base 5: mod_base = OTHER; note = 2'-O-methyluridine
  modified_base 6: mod_base = OTHER; note = 2'-O-methyluridine
  modified_base 7: mod_base = OTHER; note = 2'-O-methylguanosine
  modified_base 8: mod_base = OTHER; note = 2'-O-methylguanosine
  modified_base 9: mod_base = OTHER; note = 2'-O-methylguanosine
  modified_base 10: mod_base = OTHER; note = 2'-O-methyladenosine
  modified_base 11: mod_base = OTHER; note = 2'-O-methyladenosine
  modified_base 12: mod_base = OTHER; note = 2'-O-methyluridine
  modified_base 13: mod_base = OTHER; note = 2'-O-methylguanosine
  modified_base 14: mod_base = OTHER; note = 2'-O-methylguanosine
  modified_base 15: mod_base = OTHER; note = 2'-O-methylcytidine
  modified_base 16: mod_base = OTHER; note = 2'-O-methylcytidine
  modified_base 17: mod_base = OTHER; note = 2'-O-methyluridine
  modified_base 18: mod_base = OTHER; note = 2'-O-methylguanosine
  modified_base 19: mod_base = OTHER; note = 2'-O-methyladenosine
  modified_base 20: mod_base = OTHER; note = 2'-O-methylguanosine
  modified_base 21: mod_base = OTHER; note = 2'-O-methylguanosine
  modified_base 22: mod_base = OTHER; note = 2'-O-methylguanosine
  modified_base 23: mod_base = OTHER; note = 2'-O-methyluridine
  modified_base 24: mod_base = OTHER; note = 2'-O-methylcytidine
  modified_base 25: mod_base = OTHER; note = 2'-O-methylguanosine
  modified_base 26: mod_base = OTHER; note = 2'-O-methylguanosine
  modified_base 27: mod_base = OTHER; note = 2'-O-methylcytidine
  modified_base 28: mod_base = OTHER; note = 2'-O-methylcytidine
  modified_base 29: mod_base = OTHER; note = 2'-O-methyluridine
  modified_base 30: mod_base = OTHER; note = 2'-O-methylcytidine
  modified_base 31: mod_base = OTHER; note = 2'-O-methyladenosine
  modified_base 32: mod_base = OTHER; note = 2'-O-methylguanosine
  modified_base 33: mod_base = OTHER; note = 2'-O-methylcytidine
  modified_base 34: mod_base = OTHER; note = 2'-O-methyluridine
  modified_base 35: mod_base = OTHER; note = 2'-O-methyluridine
  modified_base 39: mod_base = OTHER; note = 2'-O-methyladenosine
  modified_base 40: mod_base = OTHER; note = 2'-O-methylcytidine
  modified_base 41: mod_base = OTHER; note = 2'-O-methyluridine
  modified_base 42: mod_base = OTHER; note = 2'-O-methyluridine
  modified_base 43: mod_base = OTHER; note = 2'-O-methylcytidine
  modified_base 44: mod_base = OTHER; note = 2'-O-methylcytidine
  modified_base 45: mod_base = OTHER; note = 2'-O-methyluridine
  modified_base 46: mod_base = OTHER; note = 2'-O-methylguanosine phosphorothioate
  modified_base 47: mod_base = OTHER; note = 2'-O-methylcytidine phosphorothioate
  modified_base 48: mod_base = OTHER; note = 2'-O-methylcytidine phosphorothioate
  modified_base 49: mod_base = OTHER; note = 2'-O-methylguanosine phosphorothioate
  modified_base 50: mod_base = OTHER; note = 2'-O-methylguanosine
  misc_feature 1..35: note = RNA
  misc_feature 36..38: note = DNA
  misc_feature 39..50: note = RNA
tttcttgggaatggcctgagggtcggcctcagctttccacttcctgccgg

SEQ ID NO: 67 - DNA, 50 bp, synthetic construct; identical to SEQ ID NO: 66
  source 1..50: mol_type = other DNA; note = Description of Artificial Sequence: Synthetic oligonucleotide; note = Description of Combined DNA/RNA Molecule: Synthetic oligonucleotide
  modified_base 1: mod_base = OTHER; note = 2'-O-methyluridine phosphorothioate
  modified_base 2: mod_base = OTHER; note = 2'-O-methyluridine phosphorothioate
  modified_base 3: mod_base = OTHER; note = 2'-O-methyluridine phosphorothioate
  modified_base 4: mod_base = OTHER; note = 2'-O-methylcytidine phosphorothioate
  modified_base 5: mod_base = OTHER; note = 2'-O-methyluridine
  modified_base 6: mod_base = OTHER; note = 2'-O-methyluridine
  modified_base 7: mod_base = OTHER; note = 2'-O-methylguanosine
  modified_base 8: mod_base = OTHER; note = 2'-O-methylguanosine
  modified_base 9: mod_base = OTHER; note = 2'-O-methylguanosine
  modified_base 10: mod_base = OTHER; note = 2'-O-methyladenosine
  modified_base 11: mod_base = OTHER; note = 2'-O-methyladenosine
  modified_base 12: mod_base = OTHER; note = 2'-O-methyluridine
  modified_base 13: mod_base = OTHER; note = 2'-O-methylguanosine
  modified_base 14: mod_base = OTHER; note = 2'-O-methylguanosine
  modified_base 15: mod_base = OTHER; note = 2'-O-methylcytidine
  modified_base 16: mod_base = OTHER; note = 2'-O-methylcytidine
  modified_base 17: mod_base = OTHER; note = 2'-O-methyluridine
  modified_base 18: mod_base = OTHER; note = 2'-O-methylguanosine
  modified_base 19: mod_base = OTHER; note = 2'-O-methyladenosine
  modified_base 20: mod_base = OTHER; note = 2'-O-methylguanosine
  modified_base 21: mod_base = OTHER; note = 2'-O-methylguanosine
  modified_base 22: mod_base = OTHER; note = 2'-O-methylguanosine
  modified_base 23: mod_base = OTHER; note = 2'-O-methyluridine
  modified_base 24: mod_base = OTHER; note = 2'-O-methylcytidine
  modified_base 25: mod_base = OTHER; note = 2'-O-methylguanosine
  modified_base 26: mod_base = OTHER; note = 2'-O-methylguanosine
  modified_base 27: mod_base = OTHER; note = 2'-O-methylcytidine
  modified_base 28: mod_base = OTHER; note = 2'-O-methylcytidine
  modified_base 29: mod_base = OTHER; note = 2'-O-methyluridine
  modified_base 30: mod_base = OTHER; note = 2'-O-methylcytidine
  modified_base 31: mod_base = OTHER; note = 2'-O-methyladenosine
  modified_base 32: mod_base = OTHER; note = 2'-O-methylguanosine
  modified_base 33: mod_base = OTHER; note = 2'-O-methylcytidine
  modified_base 34: mod_base = OTHER; note = 2'-O-methyluridine
  modified_base 35: mod_base = OTHER; note = 2'-O-methyluridine
  modified_base 36: mod_base = OTHER; note = 2'-O-methyluridine
  modified_base 39: mod_base = OTHER; note = 2'-O-methyladenosine
  modified_base 40: mod_base = OTHER; note = 2'-O-methylcytidine
  modified_base 41: mod_base = OTHER; note = 2'-O-methyluridine
  modified_base 42: mod_base = OTHER; note = 2'-O-methyluridine
  modified_base 43: mod_base = OTHER; note = 2'-O-methylcytidine
  modified_base 44: mod_base = OTHER; note = 2'-O-methylcytidine
  modified_base 45: mod_base = OTHER; note = 2'-O-methyluridine
  modified_base 46: mod_base = OTHER; note = 2'-O-methylguanosine phosphorothioate
  modified_base 47: mod_base = OTHER; note = 2'-O-methylcytidine phosphorothioate
  modified_base 48: mod_base = OTHER; note = 2'-O-methylcytidine phosphorothioate
  modified_base 49: mod_base = OTHER; note = 2'-O-methylguanosine phosphorothioate
  modified_base 50: mod_base = OTHER; note = 2'-O-methylguanosine
  misc_feature 1..36: note = RNA
  misc_feature 37..38: note = DNA
  misc_feature 39..50: note = RNA

SEQ ID NO: 68 - DNA, 50 bp, synthetic construct; identical to SEQ ID NO: 66
  source 1..50: mol_type = other DNA; note = Description of Artificial Sequence: Synthetic oligonucleotide; note = Description of Combined DNA/RNA Molecule: Synthetic oligonucleotide
  modified_base 1: mod_base = OTHER; note = 2'-O-methyluridine phosphorothioate
  modified_base 2: mod_base = OTHER; note = 2'-O-methyluridine phosphorothioate
  modified_base 3: mod_base = OTHER; note = 2'-O-methyluridine phosphorothioate
  modified_base 4: mod_base = OTHER; note = 2'-O-methylcytidine phosphorothioate
  modified_base 5: mod_base = OTHER; note = 2'-O-methyluridine
  modified_base 6: mod_base = OTHER; note = 2'-O-methyluridine
  modified_base 7: mod_base = OTHER; note = 2'-O-methylguanosine
  modified_base 8: mod_base = OTHER; note = 2'-O-methylguanosine
  modified_base 9: mod_base = OTHER; note = 2'-O-methylguanosine
  modified_base 10: mod_base = OTHER; note = 2'-O-methyladenosine
  modified_base 11: mod_base = OTHER; note = 2'-O-methyladenosine
  modified_base 12: mod_base = OTHER; note = 2'-O-methyluridine
  modified_base 13: mod_base = OTHER; note = 2'-O-methylguanosine
  modified_base 14: mod_base = OTHER; note = 2'-O-methylguanosine
  modified_base 15: mod_base = OTHER; note = 2'-O-methylcytidine
  modified_base 16: mod_base = OTHER; note = 2'-O-methylcytidine
  modified_base 17: mod_base = OTHER; note = 2'-O-methyluridine
  modified_base 18: mod_base = OTHER; note = 2'-O-methylguanosine
  modified_base 19: mod_base = OTHER; note = 2'-O-methyladenosine
  modified_base 20: mod_base = OTHER; note = 2'-O-methylguanosine
  modified_base 21: mod_base = OTHER; note = 2'-O-methylguanosine
  modified_base 22: mod_base = OTHER; note = 2'-O-methylguanosine
  modified_base 23: mod_base = OTHER; note = 2'-O-methyluridine
  modified_base 24: mod_base = OTHER; note = 2'-O-methylcytidine
  modified_base 25: mod_base = OTHER; note = 2'-O-methylguanosine
  modified_base 26: mod_base = OTHER; note = 2'-O-methylguanosine
  modified_base 27: mod_base = OTHER; note = 2'-O-methylcytidine
  modified_base 28: mod_base = OTHER; note = 2'-O-methylcytidine
  modified_base 29: mod_base = OTHER; note = 2'-O-methyluridine
  modified_base 30: mod_base = OTHER; note = 2'-O-methylcytidine
  modified_base 31: mod_base = OTHER; note = 2'-O-methyladenosine
  modified_base 32: mod_base = OTHER; note = 2'-O-methylguanosine
  modified_base 33: mod_base = OTHER; note = 2'-O-methylcytidine
  modified_base 34: mod_base = OTHER; note = 2'-O-methyluridine
  modified_base 35: mod_base = OTHER; note = 2'-O-methyluridine
  modified_base 38: mod_base = OTHER; note = 2'-O-methylcytidine
  modified_base 39: mod_base = OTHER; note = 2'-O-methyladenosine
  modified_base 40: mod_base = OTHER; note = 2'-O-methylcytidine
  modified_base 41: mod_base = OTHER; note = 2'-O-methyluridine
  modified_base 42: mod_base = OTHER; note = 2'-O-methyluridine
  modified_base 43: mod_base = OTHER; note = 2'-O-methylcytidine
  modified_base 44: mod_base = OTHER; note = 2'-O-methylcytidine
  modified_base 45: mod_base = OTHER; note = 2'-O-methyluridine
  modified_base 46: mod_base = OTHER; note = 2'-O-methylguanosine phosphorothioate
  modified_base 47: mod_base = OTHER; note = 2'-O-methylcytidine phosphorothioate
  modified_base 48: mod_base = OTHER; note = 2'-O-methylcytidine phosphorothioate
  modified_base 49: mod_base = OTHER; note = 2'-O-methylguanosine phosphorothioate
  modified_base 50: mod_base = OTHER; note = 2'-O-methylguanosine
  misc_feature 1..35: note = RNA
  misc_feature 36..37: note = DNA
  misc_feature 38..50: note = RNA

SEQ ID NO: 69 - DNA, 50 bp, synthetic construct
  source 1..50: mol_type = other DNA; note = Description of Artificial Sequence: Synthetic oligonucleotide; note = Description of Combined DNA/RNA Molecule: Synthetic oligonucleotide
  modified_base 1: mod_base = OTHER; note = 2'-O-methyluridine phosphorothioate
  modified_base 2: mod_base = OTHER; note = 2'-O-methyluridine phosphorothioate
  modified_base 3: mod_base = OTHER; note = 2'-O-methyluridine phosphorothioate
  modified_base 4: mod_base = OTHER; note = 2'-O-methylcytidine phosphorothioate
  modified_base 5: mod_base = OTHER; note = 2'-O-methyluridine
  modified_base 6: mod_base = OTHER; note = 2'-O-methyluridine
  modified_base 7: mod_base = OTHER; note = 2'-O-methylguanosine
  modified_base 8: mod_base = OTHER; note = 2'-O-methylguanosine
  modified_base 9: mod_base = OTHER; note = 2'-O-methylguanosine
  modified_base 10: mod_base = OTHER; note = 2'-O-methyladenosine
  modified_base 11: mod_base = OTHER; note = 2'-O-methyladenosine
  modified_base 12: mod_base = OTHER; note = 2'-O-methyluridine
  modified_base 13: mod_base = OTHER; note = 2'-O-methylguanosine
  modified_base 14: mod_base = OTHER; note = 2'-O-methylguanosine
  modified_base 15: mod_base = OTHER; note = 2'-O-methylcytidine
  modified_base 16: mod_base = OTHER; note = 2'-O-methylcytidine
  modified_base 17: mod_base = OTHER; note = 2'-O-methyluridine
  modified_base 18: mod_base = OTHER; note = 2'-O-methylguanosine
  modified_base 19: mod_base = OTHER; note = 2'-O-methyladenosine
  modified_base 20: mod_base = OTHER; note = 2'-O-methylguanosine
  modified_base 21: mod_base = OTHER; note = 2'-O-methyladenosine
  modified_base 22: mod_base = OTHER; note = 2'-O-methylguanosine
  modified_base 23: mod_base = OTHER; note = 2'-O-methyluridine
  modified_base 24: mod_base = OTHER; note = 2'-O-methylcytidine
  modified_base 25: mod_base = OTHER; note = 2'-O-methyladenosine
  modified_base 26: mod_base = OTHER; note = 2'-O-methylguanosine
  modified_base 27: mod_base = OTHER; note = 2'-O-methylcytidine
  modified_base 28: mod_base = OTHER; note = 2'-O-methylcytidine
  modified_base 29: mod_base = OTHER; note = 2'-O-methyluridine
  modified_base 30: mod_base = OTHER; note = 2'-O-methylcytidine
  modified_base 31: mod_base = OTHER; note = 2'-O-methyladenosine
  modified_base 32: mod_base = OTHER; note = 2'-O-methylguanosine
  modified_base 33: mod_base = OTHER; note = 2'-O-methylcytidine
  modified_base 34: mod_base = OTHER; note = 2'-O-methyluridine
  modified_base 35: mod_base = OTHER; note = 2'-O-methyluridine
  modified_base 39: mod_base = OTHER; note = 2'-O-methyladenosine
  modified_base 40: mod_base = OTHER; note = 2'-O-methylcytidine
  modified_base 41: mod_base = OTHER; note = 2'-O-methyluridine
  modified_base 42: mod_base = OTHER; note = 2'-O-methyluridine
  modified_base 43: mod_base = OTHER; note = 2'-O-methylcytidine
  modified_base 44: mod_base = OTHER; note = 2'-O-methylcytidine
  modified_base 45: mod_base = OTHER; note = 2'-O-methyluridine
  modified_base 46: mod_base = OTHER; note = 2'-O-methylguanosine phosphorothioate
  modified_base 47: mod_base = OTHER; note = 2'-O-methylcytidine phosphorothioate
  modified_base 48: mod_base = OTHER; note = 2'-O-methylcytidine phosphorothioate
  modified_base 49: mod_base = OTHER; note = 2'-O-methylguanosine phosphorothioate
  modified_base 50: mod_base = OTHER; note = 2'-O-methylguanosine
  misc_feature 1..35: note = RNA
  misc_feature 36..38: note = DNA
  misc_feature 39..50: note = RNA
tttcttgggaatggcctgagagtcagcctcagctttccacttcctgccgg

SEQ ID NO: 70 - DNA, 50 bp, synthetic construct
  source 1..50: mol_type = other DNA; note = Description of Artificial Sequence: Synthetic oligonucleotide; note = Description of Combined DNA/RNA Molecule: Synthetic oligonucleotide
  modified_base 1: mod_base = OTHER; note = 2'-O-methyluridine phosphorothioate
  modified_base 2: mod_base = OTHER; note = 2'-O-methyluridine phosphorothioate
  modified_base 3: mod_base = OTHER; note = 2'-O-methyluridine phosphorothioate
  modified_base 4: mod_base = OTHER; note = 2'-O-methylcytidine phosphorothioate
  modified_base 5: mod_base = OTHER; note = 2'-O-methyluridine
  modified_base 6: mod_base = OTHER; note = 2'-O-methyluridine
  modified_base 7: mod_base = OTHER; note = 2'-O-methylguanosine
  modified_base 8: mod_base = OTHER; note = 2'-O-methylguanosine
  modified_base 9: mod_base = OTHER; note = 2'-O-methylguanosine
  modified_base 10: mod_base = OTHER; note = 2'-O-methyladenosine
  modified_base 11: mod_base = OTHER; note = 2'-O-methyladenosine
  modified_base 12: mod_base = OTHER; note = 2'-O-methyluridine
  modified_base 13: mod_base = OTHER; note = 2'-O-methylguanosine
  modified_base 14: mod_base = OTHER; note = 2'-O-methylguanosine
  modified_base 15: mod_base = OTHER; note = 2'-O-methylcytidine
  modified_base 16: mod_base = OTHER; note = 2'-O-methylcytidine
  modified_base 17: mod_base = OTHER; note = 2'-O-methyluridine
  modified_base 18: mod_base = OTHER; note = 2'-O-methylguanosine
  modified_base 19: mod_base = OTHER; note = 2'-O-methyladenosine
  modified_base 20: mod_base = OTHER; note = 2'-O-methylguanosine
  modified_base 21: mod_base = OTHER; note = 2'-O-methyladenosine
  modified_base 22: mod_base = OTHER; note = 2'-O-methylguanosine
  modified_base 23: mod_base = OTHER; note = 2'-O-methyluridine
  modified_base 24: mod_base = OTHER; note = 2'-O-methylcytidine
  modified_base 25: mod_base = OTHER; note = 2'-O-methyladenosine
  modified_base 26: mod_base = OTHER; note = 2'-O-methylguanosine
  modified_base 27: mod_base = OTHER; note = 2'-O-methylcytidine
  modified_base 28: mod_base = OTHER; note = 2'-O-methylcytidine
  modified_base 29: mod_base = OTHER; note = 2'-O-methyluridine
  modified_base 30: mod_base = OTHER; note = 2'-O-methylcytidine
  modified_base 31: mod_base = OTHER; note = 2'-O-methyladenosine
  modified_base 32: mod_base = OTHER; note = 2'-O-methylguanosine
  modified_base 33: mod_base = OTHER; note = 2'-O-methylcytidine
  modified_base 34: mod_base = OTHER; note = 2'-O-methyluridine
  modified_base 35: mod_base = OTHER; note = 2'-O-methyluridine
  modified_base 39: mod_base = OTHER; note = 2'-O-methyladenosine
  modified_base 40: mod_base = OTHER; note = 2'-O-methylcytidine
  modified_base 41: mod_base = OTHER; note = 2'-O-methyluridine
  modified_base 42: mod_base = OTHER; note = 2'-O-methyluridine
  modified_base 43: mod_base = OTHER; note = 2'-O-methylcytidine
  modified_base 44: mod_base = OTHER; note = 2'-O-methylcytidine
  modified_base 45: mod_base = OTHER; note = 2'-O-methyluridine
  modified_base 46: mod_base = OTHER; note = 2'-O-methylguanosine phosphorothioate
  modified_base 47: mod_base = OTHER; note = 2'-O-methylcytidine phosphorothioate
  modified_base 48: mod_base = OTHER; note = 2'-O-methylcytidine phosphorothioate
  modified_base 49: mod_base = OTHER; note = 2'-O-methylguanosine phosphorothioate
  modified_base 50: mod_base = OTHER; note = 2'-O-methylguanosine
  misc_feature 1..35: note = RNA
  misc_feature 36..38: note = DNA
  misc_feature 39..50: note = RNA
tttcttgggaatggcctgagagtcagcctcagcttgccacttcctgccgg

SEQ ID NO: 71 - DNA, 50 bp, synthetic construct
  source 1..50: mol_type = other DNA; note = Description of Artificial Sequence: Synthetic oligonucleotide; note = Description of Combined DNA/RNA Molecule: Synthetic oligonucleotide
  modified_base 1: mod_base = OTHER; note = 2'-O-methyluridine phosphorothioate
  modified_base 2: mod_base = OTHER; note = 2'-O-methyluridine phosphorothioate
  modified_base 3: mod_base = OTHER; note = 2'-O-methyluridine phosphorothioate
  modified_base 4: mod_base = OTHER; note = 2'-O-methylcytidine phosphorothioate
  modified_base 5: mod_base = OTHER; note = 2'-O-methyluridine
  modified_base 6: mod_base = OTHER; note = 2'-O-methyluridine
  modified_base 7: mod_base = OTHER; note = 2'-O-methylguanosine
  modified_base 8: mod_base = OTHER; note = 2'-O-methylguanosine
  modified_base 9: mod_base = OTHER; note = 2'-O-methylguanosine
  modified_base 10: mod_base = OTHER; note = 2'-O-methyladenosine
  modified_base 11: mod_base = OTHER; note = 2'-O-methyladenosine
  modified_base 12: mod_base = OTHER; note = 2'-O-methyluridine
  modified_base 13: mod_base = OTHER; note = 2'-O-methylguanosine
  modified_base 14: mod_base = OTHER; note = 2'-O-methylguanosine
  modified_base 15: mod_base = OTHER; note = 2'-O-methylcytidine
  modified_base 16: mod_base = OTHER; note = 2'-O-methylcytidine
  modified_base 17: mod_base = OTHER; note = 2'-O-methyluridine
  modified_base 18: mod_base = OTHER; note = 2'-O-methylguanosine
  modified_base 19: mod_base = OTHER; note = 2'-O-methylcytidine
  modified_base 20: mod_base = OTHER; note = 2'-O-methylguanosine
  modified_base 21: mod_base = OTHER; note = 2'-O-methylguanosine
  modified_base 22: mod_base = OTHER; note = 2'-O-methylguanosine
  modified_base 23: mod_base = OTHER; note = 2'-O-methylcytidine
  modified_base 24: mod_base = OTHER; note = 2'-O-methylcytidine
  modified_base 25: mod_base = OTHER; note = 2'-O-methylguanosine
  modified_base 26: mod_base = OTHER; note = 2'-O-methylguanosine
  modified_base 27: mod_base = OTHER; note = 2'-O-methylcytidine
  modified_base 28: mod_base = OTHER; note = 2'-O-methylcytidine
  modified_base 29: mod_base = OTHER; note = 2'-O-methyluridine
  modified_base 30: mod_base = OTHER; note = 2'-O-methylcytidine
  modified_base 31: mod_base = OTHER; note = 2'-O-methyladenosine
  modified_base 32: mod_base = OTHER; note = 2'-O-methylguanosine
  modified_base 33: mod_base = OTHER; note = 2'-O-methylcytidine
  modified_base 34: mod_base = OTHER; note = 2'-O-methyluridine
  modified_base 35: mod_base = OTHER; note = 2'-O-methyluridine
  modified_base 39: mod_base = OTHER; note = 2'-O-methyladenosine
  modified_base 40: mod_base = OTHER; note = 2'-O-methylcytidine
  modified_base 41: mod_base = OTHER; note = 2'-O-methyluridine
  modified_base 42: mod_base = OTHER; note = 2'-O-methyluridine
  modified_base 43: mod_base = OTHER; note = 2'-O-methylcytidine
  modified_base 44: mod_base = OTHER; note = 2'-O-methylcytidine
  modified_base 45: mod_base = OTHER; note = 2'-O-methyluridine
  modified_base 46: mod_base = OTHER; note = 2'-O-methylguanosine phosphorothioate
  modified_base 47: mod_base = OTHER; note = 2'-O-methylcytidine phosphorothioate
  modified_base 48: mod_base = OTHER; note = 2'-O-methylcytidine phosphorothioate
  modified_base 49: mod_base = OTHER; note = 2'-O-methylguanosine phosphorothioate
  modified_base 50: mod_base = OTHER; note = 2'-O-methylguanosine
  misc_feature 1..35: note = RNA
  misc_feature 36..38: note = DNA
  misc_feature 39..50: note = RNA
tttcttgggaatggcctgcgggccggcctcagctttccacttcctgccgg

SEQ ID NO: 72 - DNA, 50 bp, synthetic construct
  source 1..50: mol_type = other DNA; note = Description of Artificial Sequence: Synthetic oligonucleotide; note = Description of Combined DNA/RNA Molecule: Synthetic oligonucleotide
  modified_base 1: mod_base = OTHER; note = 2'-O-methyluridine phosphorothioate
  modified_base 2: mod_base = OTHER; note = 2'-O-methyluridine phosphorothioate
  modified_base 3: mod_base = OTHER; note = 2'-O-methyluridine phosphorothioate
  modified_base 4: mod_base = OTHER; note = 2'-O-methylcytidine phosphorothioate
  modified_base 5: mod_base = OTHER; note = 2'-O-methyluridine
  modified_base 6: mod_base = OTHER; note = 2'-O-methyluridine
  modified_base 7: mod_base = OTHER; note = 2'-O-methylguanosine
  modified_base 8: mod_base = OTHER; note = 2'-O-methylguanosine
  modified_base 9: mod_base = OTHER; note = 2'-O-methylguanosine
  modified_base 10: mod_base = OTHER; note = 2'-O-methyladenosine
  modified_base 11: mod_base = OTHER; note = 2'-O-methyladenosine
  modified_base 12: mod_base = OTHER; note = 2'-O-methyluridine
  modified_base 13: mod_base = OTHER; note = 2'-O-methylguanosine
  modified_base 14: mod_base = OTHER; note = 2'-O-methylguanosine
  modified_base 15: mod_base = OTHER; note = 2'-O-methylcytidine
  modified_base 16: mod_base = OTHER; note = 2'-O-methylguanosine
  modified_base 17: mod_base = OTHER; note = 2'-O-methyluridine
  modified_base 18: mod_base = OTHER; note = 2'-O-methylguanosine
  modified_base 19: mod_base = OTHER; note = 2'-O-methyladenosine
  modified_base 20: mod_base = OTHER; note = 2'-O-methyladenosine
  modified_base 21: mod_base = OTHER; note = 2'-O-methylguanosine
  modified_base 22: mod_base = OTHER; note = 2'-O-methylguanosine
  modified_base 23: mod_base = OTHER; note = 2'-O-methyluridine
  modified_base 24: mod_base = OTHER; note = 2'-O-methylcytidine
  modified_base 25: mod_base = OTHER; note = 2'-O-methylguanosine
  modified_base 26: mod_base = OTHER; note = 2'-O-methylguanosine
  modified_base 27: mod_base = OTHER; note = 2'-O-methylcytidine
  modified_base 28: mod_base = OTHER; note = 2'-O-methylcytidine
  modified_base 29: mod_base = OTHER; note = 2'-O-methyluridine
  modified_base 30: mod_base = OTHER; note = 2'-O-methylcytidine
  modified_base 31: mod_base = OTHER; note = 2'-O-methyladenosine
  modified_base 32: mod_base = OTHER; note = 2'-O-methylguanosine
  modified_base 33: mod_base = OTHER; note = 2'-O-methylcytidine
  modified_base 34: mod_base = OTHER; note = 2'-O-methyluridine
  modified_base 35: mod_base = OTHER; note = 2'-O-methyluridine
  modified_base 39: mod_base = OTHER; note = 2'-O-methyladenosine
  modified_base 40: mod_base = OTHER; note = 2'-O-methylcytidine
  modified_base 41: mod_base = OTHER; note = 2'-O-methyluridine
  modified_base 42: mod_base = OTHER; note = 2'-O-methyluridine
  modified_base 43: mod_base = OTHER; note = 2'-O-methylcytidine
  modified_base 44: mod_base = OTHER; note = 2'-O-methylcytidine
  modified_base 45: mod_base = OTHER; note = 2'-O-methyluridine
  modified_base 46: mod_base = OTHER; note = 2'-O-methylguanosine phosphorothioate
  modified_base 47: mod_base = OTHER; note = 2'-O-methylcytidine phosphorothioate
  modified_base 48: mod_base = OTHER; note = 2'-O-methylcytidine phosphorothioate
  modified_base 49: mod_base = OTHER; note = 2'-O-methylguanosine phosphorothioate
  modified_base 50: mod_base = OTHER; note = 2'-O-methylguanosine
  misc_feature 1..35: note = RNA
  misc_feature 36..38: note = DNA
  misc_feature 39..50: note = RNA
tttcttgggaatggcgtgaaggtcggcctcagctttccacttcctgccgg

SEQ ID NO: 73 - DNA, 50 bp, synthetic construct
  source 1..50: mol_type = other DNA; note = Description of Artificial Sequence: Synthetic oligonucleotide; note = Description of Combined DNA/RNA Molecule: Synthetic oligonucleotide
  modified_base 1: mod_base = OTHER; note = 2'-O-methyluridine phosphorothioate
  modified_base 2: mod_base = OTHER; note = 2'-O-methyluridine phosphorothioate
  modified_base 3: mod_base = OTHER; note = 2'-O-methyluridine phosphorothioate
  modified_base 4: mod_base = OTHER; note = 2'-O-methylcytidine phosphorothioate
  modified_base 5: mod_base = OTHER; note = 2'-O-methyluridine
  modified_base 6: mod_base = OTHER; note = 2'-O-methyluridine
  modified_base 7: mod_base = OTHER; note = 2'-O-methylguanosine
  modified_base 8: mod_base = OTHER; note = 2'-O-methylguanosine
  modified_base 9: mod_base = OTHER; note = 2'-O-methylguanosine
  modified_base 10: mod_base = OTHER; note = 2'-O-methyladenosine
  modified_base 11: mod_base = OTHER; note = 2'-O-methyladenosine
  modified_base 12: mod_base = OTHER; note = 2'-O-methyluridine
  modified_base 13: mod_base = OTHER; note = 2'-O-methylguanosine
  modified_base 14: mod_base = OTHER; note = 2'-O-methylguanosine
  modified_base 15: mod_base = OTHER; note = 2'-O-methylcytidine
  modified_base 16: mod_base = OTHER; note = 2'-O-methylguanosine
  modified_base 17: mod_base = OTHER; note = 2'-O-methyluridine
  modified_base 18: mod_base = OTHER; note = 2'-O-methylguanosine
  modified_base 19: mod_base = OTHER; note = 2'-O-methyladenosine
  modified_base 20: mod_base = OTHER; note = 2'-O-methyladenosine
  modified_base 21: mod_base = OTHER; note = 2'-O-methylguanosine
  modified_base 22: mod_base = OTHER; note = 2'-O-methylguanosine
  modified_base 23: mod_base = OTHER; note = 2'-O-methyluridine
  modified_base 24: mod_base = OTHER; note = 2'-O-methylcytidine
  modified_base 25: mod_base = OTHER; note = 2'-O-methylguanosine
  modified_base 26: mod_base = OTHER; note = 2'-O-methylguanosine
  modified_base 27: mod_base = OTHER; note = 2'-O-methylcytidine
  modified_base 28: mod_base = OTHER; note = 2'-O-methylcytidine
  modified_base 29: mod_base = OTHER; note = 2'-O-methyluridine
  modified_base 30: mod_base = OTHER; note = 2'-O-methylcytidine
  modified_base 31: mod_base = OTHER; note = 2'-O-methyladenosine
  modified_base 32: mod_base = OTHER; note = 2'-O-methylguanosine
  modified_base 33: mod_base = OTHER; note = 2'-O-methylcytidine
  modified_base 34: mod_base = OTHER; note = 2'-O-methyluridine
  modified_base 35: mod_base = OTHER; note = 2'-O-methyluridine
  modified_base 39: mod_base = OTHER; note = 2'-O-methyladenosine
  modified_base 40: mod_base = OTHER; note = 2'-O-methylcytidine
  modified_base 41: mod_base = OTHER; note = 2'-O-methyluridine
  modified_base 42: mod_base = OTHER; note = 2'-O-methyluridine
  modified_base 43: mod_base = OTHER; note = 2'-O-methylcytidine
  modified_base 44: mod_base = OTHER; note = 2'-O-methylcytidine
  modified_base 45: mod_base = OTHER; note = 2'-O-methyluridine
  modified_base 46: mod_base = OTHER; note = 2'-O-methylguanosine phosphorothioate
  modified_base 47: mod_base = OTHER; note = 2'-O-methylcytidine phosphorothioate
  modified_base 48: mod_base = OTHER; note = 2'-O-methylcytidine phosphorothioate
  modified_base 49: mod_base = OTHER; note = 2'-O-methylguanosine phosphorothioate
  modified_base 50: mod_base = OTHER; note = 2'-O-methylguanosine
  misc_feature 1..35: note = RNA
  misc_feature 36..38: note = DNA
  misc_feature 39..50: note = RNA
tttcttgggaatggcgtgaaggtcggcctcagcttgccacttcctgccgg

SEQ ID NO: 74 - DNA, 50 bp, synthetic construct
  source 1..50: mol_type = other DNA; note = Description of Artificial Sequence: Synthetic oligonucleotide; note = Description of Combined DNA/RNA Molecule: Synthetic oligonucleotide
  modified_base 1: mod_base = OTHER; note = 2'-O-methyluridine phosphorothioate
  modified_base 2: mod_base = OTHER; note = 2'-O-methyluridine phosphorothioate
  modified_base 3: mod_base = OTHER; note = 2'-O-methyluridine phosphorothioate
  modified_base 4: mod_base = OTHER; note = 2'-O-methylcytidine phosphorothioate
  modified_base 5: mod_base = OTHER; note = 2'-O-methyluridine
  modified_base 6: mod_base = OTHER; note = 2'-O-methyluridine
  modified_base 7: mod_base = OTHER; note = 2'-O-methylguanosine
  modified_base 8: mod_base = OTHER; note = 2'-O-methylguanosine
  modified_base 9: mod_base = OTHER; note = 2'-O-methylguanosine
  modified_base 10: mod_base = OTHER; note = 2'-O-methyladenosine
  modified_base 11: mod_base = OTHER; note = 2'-O-methyladenosine
  modified_base 12: mod_base = OTHER; note = 2'-O-methyluridine
  modified_base 13: mod_base = OTHER; note = 2'-O-methylguanosine
  modified_base 14: mod_base = OTHER; note = 2'-O-methylguanosine
  modified_base 15: mod_base = OTHER; note = 2'-O-methylguanosine
  modified_base 16: mod_base = OTHER; note = 2'-O-methylcytidine
  modified_base 17: mod_base = OTHER; note = 2'-O-methyluridine
  modified_base 18: mod_base = OTHER; note = 2'-O-methylguanosine
  modified_base 19: mod_base = OTHER; note = 2'-O-methylcytidine
  modified_base 20: mod_base = OTHER; note = 2'-O-methylguanosine
  modified_base 21: mod_base = OTHER; note = 2'-O-methylguanosine
  modified_base 22: mod_base = OTHER; note = 2'-O-methylguanosine
  modified_base 23: mod_base = OTHER; note = 2'-O-methyluridine
  modified_base 24: mod_base = OTHER; note = 2'-O-methylcytidine
  modified_base 25: mod_base = OTHER; note = 2'-O-methylguanosine
  modified_base 26: mod_base = OTHER; note = 2'-O-methylguanosine
  modified_base 27: mod_base = OTHER; note = 2'-O-methylcytidine
  modified_base 28: mod_base = OTHER; note = 2'-O-methylcytidine
  modified_base 29: mod_base = OTHER; note = 2'-O-methyluridine
  modified_base 30: mod_base = OTHER; note = 2'-O-methylcytidine
  modified_base 31: mod_base = OTHER; note = 2'-O-methyladenosine
  modified_base 32: mod_base = OTHER; note = 2'-O-methylguanosine
  modified_base 33: mod_base = OTHER; note = 2'-O-methylcytidine
  modified_base 34: mod_base = OTHER; note = 2'-O-methyluridine
  modified_base 35: mod_base = OTHER; note = 2'-O-methyluridine
  modified_base 39: mod_base = OTHER; note = 2'-O-methyladenosine
  modified_base 40: mod_base = OTHER; note = 2'-O-methylcytidine
  modified_base 41: mod_base = OTHER; note = 2'-O-methyluridine
  modified_base 42: mod_base = OTHER; note = 2'-O-methyluridine
  modified_base 43: mod_base = OTHER; note = 2'-O-methylcytidine
  modified_base 44: mod_base = OTHER; note = 2'-O-methylcytidine
  modified_base 45: mod_base = OTHER; note = 2'-O-methyluridine
  modified_base 46: mod_base = OTHER; note = 2'-O-methylguanosine phosphorothioate
  modified_base 47: mod_base = OTHER; note = 2'-O-methylcytidine phosphorothioate
  modified_base 48: mod_base = OTHER; note = 2'-O-methylcytidine phosphorothioate
  modified_base 49: mod_base = OTHER; note = 2'-O-methylguanosine phosphorothioate
  modified_base 50: mod_base = OTHER; note = 2'-O-methylguanosine
  misc_feature 1..35: note = RNA
  misc_feature 36..38: note = DNA
  misc_feature 39..50: note = RNA
tttcttgggaatgggctgcgggtcggcctcagctttccacttcctgccgg

SEQ ID NO: 75 - DNA, 50 bp, synthetic construct
  source 1..50: mol_type = other DNA; note = Description of Artificial Sequence: Synthetic oligonucleotide; note = Description of Combined DNA/RNA Molecule: Synthetic oligonucleotide
  modified_base 1: mod_base = OTHER; note = 2'-O-methyluridine phosphorothioate
  modified_base 2: mod_base = OTHER; note = 2'-O-methyluridine phosphorothioate
  modified_base 3: mod_base = OTHER; note = 2'-O-methyluridine phosphorothioate
  modified_base 4: mod_base = OTHER; note = 2'-O-methylcytidine phosphorothioate
  modified_base 5: mod_base = OTHER; note = 2'-O-methyluridine
  modified_base 6: mod_base = OTHER; note = 2'-O-methyluridine
  modified_base 7: mod_base = OTHER; note = 2'-O-methylguanosine
  modified_base 8: mod_base = OTHER; note = 2'-O-methylguanosine
  modified_base 9: mod_base = OTHER; note = 2'-O-methylguanosine
  modified_base 10: mod_base = OTHER; note = 2'-O-methyladenosine
  modified_base 11: mod_base = OTHER; note = 2'-O-methyladenosine
  modified_base 12: mod_base = OTHER; note = 2'-O-methyluridine
  modified_base 13: mod_base = OTHER; note = 2'-O-methyladenosine
  modified_base 14: mod_base = OTHER; note = 2'-O-methylguanosine
  modified_base 15: mod_base = OTHER; note = 2'-O-methylcytidine
  modified_base 16: mod_base = OTHER; note = 2'-O-methylcytidine
  modified_base 17: mod_base = OTHER; note = 2'-O-methylcytidine
  modified_base 18: mod_base = OTHER; note = 2'-O-methylguanosine
  modified_base 19: mod_base = OTHER; note = 2'-O-methyladenosine
  modified_base 20: mod_base = OTHER; note = 2'-O-methylguanosine
  modified_base 21: mod_base = OTHER; note = 2'-O-methylguanosine
  modified_base 22: mod_base = OTHER; note = 2'-O-methylguanosine
  modified_base 23: mod_base = OTHER; note = 2'-O-methyluridine
  modified_base 24: mod_base = OTHER; note = 2'-O-methylcytidine
  modified_base 25: mod_base = OTHER; note = 2'-O-methylguanosine
  modified_base 26: mod_base = OTHER; note = 2'-O-methylguanosine
  modified_base 27: mod_base = OTHER; note = 2'-O-methylcytidine
  modified_base 28: mod_base = OTHER; note = 2'-O-methylcytidine
  modified_base 29: mod_base = OTHER; note = 2'-O-methyluridine
  modified_base 30: mod_base = OTHER; note = 2'-O-methylcytidine
  modified_base 31: mod_base = OTHER; note = 2'-O-methyladenosine
  modified_base 32: mod_base = OTHER; note = 2'-O-methylguanosine
  modified_base 33: mod_base = OTHER; note = 2'-O-methylcytidine
  modified_base 34: mod_base = OTHER; note = 2'-O-methyluridine
  modified_base 35: mod_base = OTHER; note = 2'-O-methyluridine
  modified_base 39: mod_base = OTHER; note = 2'-O-methyladenosine
  modified_base 40: mod_base = OTHER; note = 2'-O-methylcytidine
  modified_base 41: mod_base = OTHER; note = 2'-O-methyluridine
  modified_base 42: mod_base = OTHER; note = 2'-O-methyluridine
  modified_base 43: mod_base = OTHER; note = 2'-O-methylcytidine
  modified_base 44: mod_base = OTHER; note = 2'-O-methylcytidine
  modified_base 45: mod_base = OTHER; note = 2'-O-methyluridine
  modified_base 46: mod_base = OTHER; note = 2'-O-methylguanosine phosphorothioate
  modified_base 47: mod_base = OTHER; note = 2'-O-methylcytidine phosphorothioate
  modified_base 48: mod_base = OTHER; note = 2'-O-methylcytidine phosphorothioate
  modified_base 49: mod_base = OTHER; note = 2'-O-methylguanosine phosphorothioate
  modified_base 50: mod_base = OTHER; note = 2'-O-methylguanosine
  misc_feature 1..35: note = RNA
  misc_feature 36..38: note = DNA
  misc_feature 39..50: note = RNA
tttcttgggaatagcccgagggtcggcctcagctttccacttcctgccgg

SEQ ID NO: 76 - DNA, 50 bp, synthetic construct; identical to SEQ ID NO: 66
  source 1..50: mol_type = other DNA; note = Description of Artificial Sequence: Synthetic oligonucleotide; note = Description of Combined DNA/RNA Molecule: Synthetic oligonucleotide
  modified_base 1: mod_base = OTHER; note = 2'-O-methyluridine phosphorothioate
  modified_base 2: mod_base = OTHER; note = 2'-O-methyluridine phosphorothioate
  modified_base 3: mod_base = OTHER; note = 2'-O-methyluridine phosphorothioate
  modified_base 4: mod_base = OTHER; note = 2'-O-methylcytidine phosphorothioate
  modified_base 5: mod_base = OTHER; note = 2'-O-methyluridine
  modified_base 6: mod_base = OTHER; note = 2'-O-methyluridine
  modified_base 7: mod_base = OTHER; note = 2'-O-methylguanosine
  modified_base 8: mod_base = OTHER; note = 2'-O-methylguanosine
  modified_base 9: mod_base = OTHER; note = 2'-O-methylguanosine
  modified_base 10: mod_base = OTHER; note = 2'-O-methyladenosine
  modified_base 11: mod_base = OTHER; note = 2'-O-methyladenosine
  modified_base 12: mod_base = OTHER; note = 2'-O-methyluridine
  modified_base 13: mod_base = OTHER; note = 2'-O-methylguanosine
  modified_base 14: mod_base = OTHER; note = 2'-O-methylguanosine
  modified_base 15: mod_base = OTHER; note = 2'-O-methylcytidine
  modified_base 16: mod_base = OTHER; note = 2'-O-methylcytidine
  modified_base 17: mod_base = OTHER; note = 2'-O-methyluridine
  modified_base 18: mod_base = OTHER; note = 2'-O-methylguanosine
  modified_base 19: mod_base = OTHER; note = 2'-O-methyladenosine
  modified_base 20: mod_base = OTHER; note = 2'-O-methylguanosine
  modified_base 21: mod_base = OTHER; note = 2'-O-methylguanosine
  modified_base 22: mod_base = OTHER; note = 2'-O-methylguanosine
  modified_base 23: mod_base = OTHER; note = 2'-O-methyluridine
  modified_base 24: mod_base = OTHER; note = 2'-O-methylcytidine
  modified_base 25: mod_base = OTHER; note = 2'-O-methylguanosine
  modified_base 26: mod_base = OTHER; note = 2'-O-methylguanosine
  modified_base 27: mod_base = OTHER; note = 2'-O-methylcytidine
  modified_base 28: mod_base = OTHER; note = 2'-O-methylcytidine
  modified_base 29: mod_base = OTHER; note = 2'-O-methyluridine
  modified_base 30: mod_base = OTHER; note = 2'-O-methylcytidine
  modified_base 31: mod_base = OTHER; note = 2'-O-methyladenosine
  modified_base 32: mod_base = OTHER; note = 2'-O-methylguanosine
  modified_base 33: mod_base = OTHER; note = 2'-O-methylcytidine
  modified_base 34: mod_base = OTHER; note = 2'-O-methyluridine
  modified_base 35: mod_base = OTHER; note = 2'-O-methyluridine
  modified_base 36: mod_base = OTHER; note = 2'-fluoroarabinouridine
  modified_base 39: mod_base = OTHER; note = 2'-O-methyladenosine
  modified_base 40: mod_base = OTHER; note = 2'-O-methylcytidine
  modified_base 41: mod_base = OTHER; note = 2'-O-methyluridine
  modified_base 42: mod_base = OTHER; note = 2'-O-methyluridine
  modified_base 43: mod_base = OTHER; note = 2'-O-methylcytidine
  modified_base 44: mod_base = OTHER; note = 2'-O-methylcytidine
  modified_base 45: mod_base = OTHER; note = 2'-O-methyluridine
  modified_base 46: mod_base = OTHER; note = 2'-O-methylguanosine phosphorothioate
  modified_base 47: mod_base = OTHER; note = 2'-O-methylcytidine phosphorothioate
  modified_base 48: mod_base = OTHER; note = 2'-O-methylcytidine phosphorothioate
  modified_base 49: mod_base = OTHER; note = 2'-O-methylguanosine phosphorothioate
  modified_base 50: mod_base = OTHER; note = 2'-O-methylguanosine
  misc_feature 1..36: note = RNA
  misc_feature 37..38: note = DNA
  misc_feature 39..50: note = RNA

SEQ ID NO: 77 - DNA, 50 bp, synthetic construct; identical to SEQ ID NO: 66
  source 1..50: mol_type = other DNA; note = Description of Artificial Sequence: Synthetic oligonucleotide; note = Description of Combined DNA/RNA Molecule: Synthetic oligonucleotide
  modified_base 1: mod_base = OTHER; note = 2'-O-methyluridine phosphorothioate
  modified_base 2: mod_base = OTHER; note = 2'-O-methyluridine phosphorothioate
  modified_base 3: mod_base = OTHER; note = 2'-O-methyluridine phosphorothioate
  modified_base 4: mod_base = OTHER; note = 2'-O-methylcytidine phosphorothioate
  modified_base 5: mod_base = OTHER; note = 2'-O-methyluridine
  modified_base 6: mod_base = OTHER; note = 2'-O-methyluridine
  modified_base 7: mod_base = OTHER; note = 2'-O-methylguanosine
  modified_base 8: mod_base = OTHER; note = 2'-O-methylguanosine
  modified_base 9: mod_base = OTHER; note = 2'-O-methylguanosine
  modified_base 10: mod_base = OTHER; note = 2'-O-methyladenosine
  modified_base 11: mod_base = OTHER; note = 2'-O-methyladenosine
  modified_base 12: mod_base = OTHER; note = 2'-O-methyluridine
  modified_base 13: mod_base = OTHER; note = 2'-O-methylguanosine
  modified_base 14: mod_base = OTHER; note = 2'-O-methylguanosine
  modified_base 15: mod_base = OTHER; note = 2'-O-methylcytidine
  modified_base 16: mod_base = OTHER; note = 2'-O-methylcytidine
  modified_base 17: mod_base = OTHER; note = 2'-O-methyluridine
  modified_base 18: mod_base = OTHER; note = 2'-O-methylguanosine
  modified_base 19: mod_base = OTHER; note = 2'-O-methyladenosine
  modified_base 20: mod_base = OTHER; note = 2'-O-methylguanosine
  modified_base 21: mod_base = OTHER; note = 2'-O-methylguanosine
  modified_base 22: mod_base = OTHER; note = 2'-O-methylguanosine
  modified_base 23: mod_base = OTHER; note = 2'-O-methyluridine
  modified_base 24: mod_base = OTHER; note = 2'-O-methylcytidine
  modified_base 25: mod_base = OTHER; note = 2'-O-methylguanosine
  modified_base 26: mod_base = OTHER; note = 2'-O-methylguanosine
  modified_base 27: mod_base = OTHER; note = 2'-O-methylcytidine
  modified_base 28: mod_base = OTHER; note = 2'-O-methylcytidine
  modified_base 29: mod_base = OTHER; note = 2'-O-methyluridine
  modified_base 30: mod_base = OTHER; note = 2'-O-methylcytidine
  modified_base 31: mod_base = OTHER; note = 2'-O-methyladenosine
  modified_base 32: mod_base = OTHER; note = 2'-O-methylguanosine
  modified_base 33: mod_base = OTHER; note = 2'-O-methylcytidine
  modified_base 34: mod_base = OTHER; note = 2'-O-methyluridine
  modified_base 35: mod_base = OTHER; note = 2'-O-methyluridine
  modified_base 37: mod_base = OTHER; note = 2'-fluoroarabinocytidine
  modified_base 39: mod_base = OTHER; note = 2'-O-methyladenosine
  modified_base 40: mod_base = OTHER; note = 2'-O-methylcytidine
  modified_base 41: mod_base = OTHER; note = 2'-O-methyluridine
  modified_base 42: mod_base = OTHER; note = 2'-O-methyluridine
  modified_base 43: mod_base = OTHER; note = 2'-O-methylcytidine
  modified_base 44: mod_base = OTHER; note = 2'-O-methylcytidine
  modified_base 45: mod_base = OTHER; note = 2'-O-methyluridine
  modified_base 46: mod_base = OTHER; note = 2'-O-methylguanosine phosphorothioate
  modified_base 47: mod_base = OTHER; note = 2'-O-methylcytidine phosphorothioate
  modified_base 48: mod_base = OTHER; note = 2'-O-methylcytidine phosphorothioate
  modified_base 49: mod_base = OTHER; note = 2'-O-methylguanosine phosphorothioate
  modified_base 50: mod_base = OTHER; note = 2'-O-methylguanosine
  misc_feature 1..35: note = RNA
  misc_feature 36: note = DNA
  misc_feature 37: note = RNA
  misc_feature 38: note = DNA
  misc_feature 39..50: note = RNA

SEQ ID NO: 78 - DNA, 50 bp, synthetic construct; identical to SEQ ID NO: 66
  source 1..50: mol_type = other DNA; note = Description of Artificial Sequence: Synthetic oligonucleotide; note = Description of Combined DNA/RNA Molecule: Synthetic oligonucleotide
  modified_base 1: mod_base = OTHER; note = 2'-O-methyluridine phosphorothioate
  modified_base 2: mod_base = OTHER; note = 2'-O-methyluridine phosphorothioate
  modified_base 3: mod_base = OTHER; note = 2'-O-methyluridine phosphorothioate
  modified_base 4: mod_base = OTHER; note = 2'-O-methylcytidine phosphorothioate
  modified_base 5: mod_base = OTHER; note = 2'-O-methyluridine
  modified_base 6: mod_base = OTHER; note = 2'-O-methyluridine
  modified_base 7: mod_base = OTHER; note = 2'-O-methylguanosine
  modified_base 8: mod_base = OTHER; note = 2'-O-methylguanosine
  modified_base 9: mod_base = OTHER; note = 2'-O-methylguanosine
  modified_base 10: mod_base = OTHER; note = 2'-O-methyladenosine
  modified_base 11: mod_base = OTHER; note = 2'-O-methyladenosine
  modified_base 12: mod_base = OTHER; note = 2'-O-methyluridine
  modified_base 13: mod_base = OTHER; note = 2'-O-methylguanosine
  modified_base 14: mod_base = OTHER; note = 2'-O-methylguanosine
  modified_base 15: mod_base = OTHER; note = 2'-O-methylcytidine
  modified_base 16: mod_base = OTHER; note = 2'-O-methylcytidine
  modified_base 17: mod_base = OTHER; note = 2'-O-methyluridine
  modified_base 18: mod_base = OTHER; note = 2'-O-methylguanosine
  modified_base 19: mod_base = OTHER; note = 2'-O-methyladenosine
  modified_base 20: mod_base = OTHER; note = 2'-O-methylguanosine
  modified_base 21: mod_base = OTHER; note = 2'-O-methylguanosine
  modified_base 22: mod_base = OTHER; note = 2'-O-methylguanosine
  modified_base 23: mod_base = OTHER; note = 2'-O-methyluridine
  modified_base 24: mod_base = OTHER; note = 2'-O-methylcytidine
  modified_base 25: mod_base = OTHER; note = 2'-O-methylguanosine
  modified_base 26: mod_base = OTHER; note = 2'-O-methylguanosine
  modified_base 27: mod_base = OTHER; note = 2'-O-methylcytidine
  modified_base 28: mod_base = OTHER; note = 2'-O-methylcytidine
  modified_base 29: mod_base = OTHER; note = 2'-O-methyluridine
  modified_base 30: mod_base = OTHER; note = 2'-O-methylcytidine
  modified_base 31: mod_base = OTHER; note = 2'-O-methyladenosine
  modified_base 32: mod_base = OTHER; note = 2'-O-methylguanosine
  modified_base 33: mod_base = OTHER; note = 2'-O-methylcytidine
  modified_base 34: mod_base = OTHER; note = 2'-O-methyluridine
  modified_base 35: mod_base = OTHER; note = 2'-O-methyluridine
  modified_base 38: mod_base = OTHER; note = 2'-fluoroarabinocytidine
  modified_base 39: mod_base = OTHER; note = 2'-O-methyladenosine
  modified_base 40: mod_base = OTHER; note = 2'-O-methylcytidine
  modified_base 41: mod_base = OTHER; note = 2'-O-methyluridine
  modified_base 42: mod_base = OTHER; note = 2'-O-methyluridine
  modified_base 43: mod_base = OTHER; note = 2'-O-methylcytidine
  modified_base 44: mod_base = OTHER; note = 2'-O-methylcytidine
  modified_base 45: mod_base = OTHER; note = 2'-O-methyluridine
  modified_base 46: mod_base = OTHER; note = 2'-O-methylguanosine phosphorothioate
  modified_base 47: mod_base = OTHER; note = 2'-O-methylcytidine phosphorothioate
  modified_base 48: mod_base = OTHER; note = 2'-O-methylcytidine phosphorothioate
  modified_base 49: mod_base = OTHER; note = 2'-O-methylguanosine phosphorothioate
  modified_base 50: mod_base = OTHER; note = 2'-O-methylguanosine
  misc_feature 1..35: note = RNA
  misc_feature 36..37: note = DNA
  misc_feature 38..50: note = RNA

SEQ ID NO: 79 - RNA, 50 nt, synthetic construct
  source 1..50: mol_type = other RNA; note = Description of Artificial Sequence: Synthetic oligonucleotide
  modified_base 1: mod_base = OTHER; note = 2'-O-methyluridine phosphorothioate
  modified_base 2: mod_base = OTHER; note = 2'-O-methyluridine phosphorothioate
  modified_base 3: mod_base = OTHER; note = 2'-O-methyluridine phosphorothioate
  modified_base 4: mod_base = OTHER; note = 2'-O-methylcytidine phosphorothioate
  modified_base 5: mod_base = OTHER; note = 2'-O-methyluridine
  modified_base 6: mod_base = OTHER; note = 2'-O-methyluridine
  modified_base 7: mod_base = OTHER; note = 2'-O-methylguanosine
  modified_base 8: mod_base = OTHER; note = 2'-O-methylguanosine
  modified_base 9: mod_base = OTHER; note = 2'-O-methylguanosine
  modified_base 10: mod_base = OTHER; note = 2'-O-methyladenosine
  modified_base 11: mod_base = OTHER; note = 2'-O-methyladenosine
  modified_base 12: mod_base = OTHER; note = 2'-O-methyluridine
  modified_base 13: mod_base = OTHER; note = 2'-O-methylguanosine
  modified_base 14: mod_base = OTHER; note = 2'-O-methylguanosine
  modified_base 15: mod_base = OTHER; note = 2'-O-methylcytidine
  modified_base 16: mod_base = OTHER; note = 2'-O-methylcytidine
  modified_base 17: mod_base = OTHER; note = 2'-O-methyluridine
  modified_base 18: mod_base = OTHER; note = 2'-O-methylguanosine
  modified_base 19: mod_base = OTHER; note = 2'-O-methyladenosine
  modified_base 20: mod_base = OTHER; note = 2'-O-methylguanosine
  modified_base 21: mod_base = OTHER; note = 2'-O-methylguanosine
  modified_base 22: mod_base = OTHER; note = 2'-O-methylguanosine
  modified_base 23: mod_base = OTHER; note = 2'-O-methyluridine
  modified_base 24: mod_base = OTHER; note = 2'-O-methylcytidine
  modified_base 25: mod_base = OTHER; note = 2'-O-methylguanosine
  modified_base 26: mod_base = OTHER; note = 2'-O-methylguanosine
  modified_base 27: mod_base = OTHER; note = 2'-O-methylcytidine
  modified_base 28: mod_base = OTHER; note = 2'-O-methylcytidine
  modified_base 29: mod_base = OTHER; note = 2'-O-methyluridine
  modified_base 30: mod_base = OTHER; note = 2'-O-methylcytidine
  modified_base 31: mod_base = OTHER; note = 2'-O-methyladenosine
  modified_base 32: mod_base = OTHER; note = 2'-O-methylguanosine
  modified_base 33: mod_base = OTHER; note = 2'-O-methylcytidine
  modified_base 34: mod_base = OTHER; note = 2'-O-methyluridine
  modified_base 35: mod_base = OTHER; note = 2'-O-methyluridine
  modified_base 36: mod_base = OTHER; note = 2'-fluoroarabinouridine
  modified_base 37: mod_base = OTHER; note = 2'-fluoroarabinocytidine
  modified_base 38: mod_base = OTHER; note = 2'-fluoroarabinocytidine
  modified_base 39: mod_base = OTHER; note = 2'-O-methyladenosine
  modified_base 40: mod_base = OTHER; note = 2'-O-methylcytidine
  modified_base 41: mod_base = OTHER; note = 2'-O-methyluridine
  modified_base 42: mod_base = OTHER; note = 2'-O-methyluridine
  modified_base 43: mod_base = OTHER; note = 2'-O-methylcytidine
  modified_base 44: mod_base = OTHER; note = 2'-O-methylcytidine
  modified_base 45: mod_base = OTHER; note = 2'-O-methyluridine
  modified_base 46: mod_base = OTHER; note = 2'-O-methylguanosine phosphorothioate
  modified_base 47: mod_base = OTHER; note = 2'-O-methylcytidine phosphorothioate
  modified_base 48: mod_base = OTHER; note = 2'-O-methylcytidine phosphorothioate
  modified_base 49: mod_base = OTHER; note = 2'-O-methylguanosine phosphorothioate
  modified_base 50: mod_base = OTHER; note = 2'-O-methylguanosine
tttcttgggaatggcctgagggtcggcctcagctttccacttcctgccgg

SEQ ID NO: 80 - DNA, 50 bp, synthetic construct; identical to SEQ ID NO: 66
  source 1..50: mol_type = other DNA; note = Description of Artificial Sequence: Synthetic oligonucleotide; note = Description of Combined DNA/RNA Molecule: Synthetic oligonucleotide
  modified_base 1: mod_base = OTHER; note = 2'-O-methyluridine phosphorothioate
  modified_base 2: mod_base = OTHER; note = 2'-O-methyluridine phosphorothioate
  modified_base 3: mod_base = OTHER; note = 2'-O-methyluridine phosphorothioate
  modified_base 4: mod_base = OTHER; note = 2'-O-methylcytidine phosphorothioate
  modified_base 5: mod_base = OTHER; note = 2'-O-methyluridine
  modified_base 6: mod_base = OTHER; note = 2'-O-methyluridine
  modified_base 7: mod_base = OTHER; note = 2'-O-methylguanosine
  modified_base 8: mod_base = OTHER; note = 2'-O-methylguanosine
  modified_base 9: mod_base = OTHER; note = 2'-O-methylguanosine
  modified_base 10: mod_base = OTHER; note = 2'-O-methyladenosine
  modified_base 11: mod_base = OTHER; note = 2'-O-methyladenosine
  modified_base 12: mod_base = OTHER; note = 2'-O-methyluridine
  modified_base 13: mod_base = OTHER; note = 2'-O-methylguanosine
  modified_base 14: mod_base = OTHER; note = 2'-O-methylguanosine
  modified_base 15: mod_base = OTHER; note = 2'-O-methylcytidine
  modified_base 16: mod_base = OTHER; note = 2'-O-methylcytidine
  modified_base 17: mod_base = OTHER; note = 2'-O-methyluridine
  modified_base 18: mod_base = OTHER; note = 2'-O-methylguanosine
  modified_base 19: mod_base = OTHER; note = 2'-O-methyladenosine
  modified_base 20: mod_base = OTHER; note = 2'-O-methylguanosine
  modified_base 21: mod_base = OTHER; note = 2'-O-methylguanosine
  modified_base 22: mod_base = OTHER; note = 2'-O-methylguanosine
  modified_base 23: mod_base = OTHER; note = 2'-O-methyluridine
  modified_base 24: mod_base = OTHER; note = 2'-O-methylcytidine
  modified_base 25: mod_base = OTHER; note = 2'-O-methylguanosine
  modified_base 26: mod_base = OTHER; note = 2'-O-methylguanosine
  modified_base 27: mod_base = OTHER; note = 2'-O-methylcytidine
  modified_base 28: mod_base = OTHER; note = 2'-O-methylcytidine
  modified_base 29: mod_base = OTHER; note = 2'-O-methyluridine
  modified_base 30: mod_base = OTHER; note = 2'-O-methylcytidine
  modified_base 31: mod_base = OTHER; note = 2'-O-methyladenosine
  modified_base 32: mod_base = OTHER; note = 2'-O-methylguanosine
  modified_base 33: mod_base = OTHER; note = 2'-O-methylcytidine
  modified_base 34: mod_base = OTHER; note = 2'-O-methyluridine
  modified_base 35: mod_base = OTHER; note = 2'-O-methyluridine
  modified_base 37: mod_base = OTHER; note = 2'-fluoroarabinocytidine
  modified_base 38: mod_base = OTHER; note = 2'-fluoroarabinocytidine
  modified_base 39: mod_base = OTHER; note = 2'-O-methyladenosine
  modified_base 40: mod_base = OTHER; note = 2'-O-methylcytidine
  modified_base 41: mod_base = OTHER; note = 2'-O-methyluridine
  modified_base 42: mod_base = OTHER; note = 2'-O-methyluridine
  modified_base 43: mod_base = OTHER; note = 2'-O-methylcytidine
  modified_base 44: mod_base = OTHER; note = 2'-O-methylcytidine
  modified_base 45: mod_base = OTHER; note = 2'-O-methyluridine
  modified_base 46: mod_base = OTHER; note = 2'-O-methylguanosine phosphorothioate
  modified_base 47: mod_base = OTHER; note = 2'-O-methylcytidine phosphorothioate
  modified_base 48: mod_base = OTHER; note = 2'-O-methylcytidine phosphorothioate
  modified_base 49: mod_base = OTHER; note = 2'-O-methylguanosine phosphorothioate
  modified_base 50: mod_base = OTHER; note = 2'-O-methylguanosine
  misc_feature 1..35: note = RNA
  misc_feature 36: note = DNA
  misc_feature 37..50: note = RNA

SEQ ID NO: 81 - DNA, 50 bp, synthetic construct; identical to SEQ ID NO: 66
  source 1..50: mol_type = other DNA; note = Description of Artificial Sequence: Synthetic oligonucleotide; note = Description of Combined DNA/RNA Molecule: Synthetic oligonucleotide
  modified_base 1: mod_base = OTHER; note = 2'-O-methyluridine phosphorothioate
  modified_base 2: mod_base = OTHER; note = 2'-O-methyluridine phosphorothioate
  modified_base 3: mod_base = OTHER; note = 2'-O-methyluridine phosphorothioate
  modified_base 4: mod_base = OTHER; note = 2'-O-methylcytidine phosphorothioate
  modified_base 5: mod_base = OTHER; note = 2'-O-methyluridine
  modified_base 6: mod_base = OTHER; note = 2'-O-methyluridine
  modified_base 7: mod_base = OTHER; note = 2'-O-methylguanosine
  modified_base 8: mod_base = OTHER; note = 2'-O-methylguanosine
  modified_base 9: mod_base = OTHER; note = 2'-O-methylguanosine
  modified_base 10: mod_base = OTHER; note = 2'-O-methyladenosine
  modified_base 11: mod_base = OTHER; note = 2'-O-methyladenosine
  modified_base 12: mod_base = OTHER; note = 2'-O-methyluridine
  modified_base 13: mod_base = OTHER; note = 2'-O-methylguanosine
  modified_base 14: mod_base = OTHER; note = 2'-O-methylguanosine
  modified_base 15: mod_base = OTHER; note = 2'-O-methylcytidine
  modified_base 16: mod_base = OTHER; note = 2'-O-methylcytidine
  modified_base 17: mod_base = OTHER; note = 2'-O-methyluridine
  modified_base 18: mod_base = OTHER; note = 2'-O-methylguanosine
  modified_base 19: mod_base = OTHER; note = 2'-O-methyladenosine
  modified_base 20: mod_base = OTHER; note = 2'-O-methylguanosine
  modified_base 21: mod_base = OTHER; note = 2'-O-methylguanosine
  modified_base 22: mod_base = OTHER; note = 2'-O-methylguanosine
  modified_base 23: mod_base = OTHER; note = 2'-O-methyluridine
  modified_base 24: mod_base = OTHER; note = 2'-O-methylcytidine
  modified_base 25: mod_base = OTHER; note = 2'-O-methylguanosine
  modified_base 26: mod_base = OTHER; note = 2'-O-methylguanosine
  modified_base 27: mod_base = OTHER; note = 2'-O-methylcytidine
  modified_base 28: mod_base = OTHER; note = 2'-O-methylcytidine
  modified_base 29: mod_base = OTHER; note = 2'-O-methyluridine
  modified_base 30: mod_base = OTHER; note = 2'-O-methylcytidine
  modified_base 31: mod_base = OTHER; note = 2'-O-methyladenosine
  modified_base 32: mod_base = OTHER; note = 2'-O-methylguanosine
  modified_base 33: mod_base = OTHER; note = 2'-O-methylcytidine
  modified_base 34: mod_base = OTHER; note = 2'-O-methyluridine
  modified_base 35: mod_base = OTHER; note = 2'-O-methyluridine
  modified_base 36: mod_base = OTHER; note = 2'-fluoroarabinouridine
  modified_base 37: mod_base = OTHER; note = 2'-fluoroarabinocytidine
  modified_base 39: mod_base = OTHER; note = 2'-O-methyladenosine
  modified_base 40: mod_base = OTHER; note = 2'-O-methylcytidine
  modified_base 41: mod_base = OTHER; note = 2'-O-methyluridine
  modified_base 42: mod_base = OTHER; note = 2'-O-methyluridine
  modified_base 43: mod_base = OTHER; note = 2'-O-methylcytidine
  modified_base 44: mod_base = OTHER; note = 2'-O-methylcytidine
  modified_base 45: mod_base = OTHER; note = 2'-O-methyluridine
  modified_base 46: mod_base = OTHER; note = 2'-O-methylguanosine phosphorothioate
  modified_base 47: mod_base = OTHER; note = 2'-O-methylcytidine phosphorothioate
  modified_base 48: mod_base = OTHER; note = 2'-O-methylcytidine phosphorothioate
  modified_base 49: mod_base = OTHER; note = 2'-O-methylguanosine phosphorothioate
  modified_base 50: mod_base = OTHER; note = 2'-O-methylguanosine
  misc_feature 1..37: note = RNA
  misc_feature 38: note = DNA
  misc_feature 39..50: note = RNA

SEQ ID NO: 82 - DNA, 50 bp, synthetic construct; identical to SEQ ID NO: 66
  source 1..50: mol_type = other DNA; note = Description of Artificial Sequence: Synthetic oligonucleotide; note = Description of Combined DNA/RNA Molecule: Synthetic oligonucleotide
  modified_base 1: mod_base = OTHER; note = 2'-O-methyluridine phosphorothioate
  modified_base 2: mod_base = OTHER; note = 2'-O-methyluridine phosphorothioate
  modified_base 3: mod_base = OTHER; note = 2'-O-methyluridine phosphorothioate
  modified_base 4: mod_base = OTHER; note = 2'-O-methylcytidine phosphorothioate
  modified_base 5: mod_base = OTHER; note = 2'-O-methyluridine
  modified_base 6: mod_base = OTHER; note = 2'-O-methyluridine
  modified_base 7: mod_base = OTHER; note = 2'-O-methylguanosine
  modified_base 8: mod_base = OTHER; note = 2'-O-methylguanosine
  modified_base 9: mod_base = OTHER; note = 2'-O-methylguanosine
  modified_base 10: mod_base = OTHER; note = 2'-O-methyladenosine
  modified_base 11: mod_base = OTHER; note = 2'-O-methyladenosine
  modified_base 12: mod_base = OTHER; note = 2'-O-methyluridine
  modified_base 13: mod_base = OTHER; note = 2'-O-methylguanosine
  modified_base 14: mod_base = OTHER; note = 2'-O-methylguanosine
  modified_base 15: mod_base = OTHER; note = 2'-O-methylcytidine
  modified_base 16: mod_base = OTHER; note = 2'-O-methylcytidine
  modified_base 17: mod_base = OTHER; note = 2'-O-methyluridine
  modified_base 18: mod_base = OTHER; note = 2'-O-methylguanosine
  modified_base 19: mod_base = OTHER; note = 2'-O-methyladenosine
  modified_base 20: mod_base = OTHER; note = 2'-O-methylguanosine
  modified_base 21: mod_base = OTHER; note = 2'-O-methylguanosine
  modified_base 22: mod_base = OTHER; note = 2'-O-methylguanosine
  modified_base 23: mod_base = OTHER; note = 2'-O-methyluridine
  modified_base 24: mod_base = OTHER; note = 2'-O-methylcytidine
  modified_base 25: mod_base = OTHER; note = 2'-O-methylguanosine
  modified_base 26: mod_base = OTHER; note = 2'-O-methylguanosine
  modified_base 27: mod_base = OTHER; note = 2'-O-methylcytidine
  modified_base 28: mod_base = OTHER; note = 2'-O-methylcytidine
  modified_base 29: mod_base = OTHER; note = 2'-O-methyluridine
  modified_base 30: mod_base = OTHER; note = 2'-O-methylcytidine
  modified_base 31: mod_base = OTHER; note = 2'-O-methyladenosine
  modified_base 32: mod_base = OTHER; note = 2'-O-methylguanosine
  modified_base 33: mod_base = OTHER; note = 2'-O-methylcytidine
  modified_base 34: mod_base = OTHER; note = 2'-O-methyluridine
  modified_base 35: mod_base = OTHER; note = 2'-O-methyluridine
  modified_base 36: mod_base = OTHER; note = 2'-fluoroarabinouridine
  modified_base 38: mod_base = OTHER; note = 2'-fluoroarabinocytidine
  modified_base 39: mod_base = OTHER; note = 2'-O-methyladenosine
  modified_base 40: mod_base = OTHER; note = 2'-O-methylcytidine
  modified_base 41: mod_base = OTHER; note = 2'-O-methyluridine
  modified_base 42: mod_base = OTHER; note = 2'-O-methyluridine
  modified_base 43: mod_base = OTHER; note = 2'-O-methylcytidine
  modified_base 44: mod_base = OTHER; note = 2'-O-methylcytidine
  modified_base 45: mod_base = OTHER; note = 2'-O-methyluridine
  modified_base 46: mod_base = OTHER; note = 2'-O-methylguanosine phosphorothioate
  modified_base 47: mod_base = OTHER; note = 2'-O-methylcytidine phosphorothioate
  modified_base 48: mod_base = OTHER; note = 2'-O-methylcytidine phosphorothioate
  modified_base 49: mod_base = OTHER; note = 2'-O-methylguanosine phosphorothioate
  modified_base 50: mod_base = OTHER; note = 2'-O-methylguanosine
  misc_feature 1..36: note = RNA
  misc_feature 37: note = DNA
  misc_feature 38..50: note = RNA

SEQ ID NO: 83 - DNA, 63 bp, synthetic construct
  source 1..63: mol_type = other DNA; note = Description of Artificial Sequence: Synthetic oligonucleotide; note = Description of Combined DNA/RNA Molecule: Synthetic oligonucleotide
  modified_base 1: mod_base = OTHER; note = 2'-O-methylguanosine phosphorothioate
  modified_base 2: mod_base = OTHER; note = 2'-O-methyluridine phosphorothioate
  modified_base 3: mod_base = OTHER; note = 2'-O-methylguanosine phosphorothioate
  modified_base 4: mod_base = OTHER; note = 2'-O-methylguanosine phosphorothioate
  modified_base 5: mod_base = OTHER; note = 2'-O-methyladenosine
  modified_base 6: mod_base = OTHER; note = 2'-O-methyladenosine
  modified_base 7: mod_base = OTHER; note = 2'-O-methyluridine
  modified_base 8: mod_base = OTHER; note = 2'-O-methyladenosine
  modified_base 9: mod_base = OTHER; note = 2'-O-methylguanosine
  modified_base 10: mod_base = OTHER; note = 2'-O-methyluridine
  modified_base 11: mod_base = OTHER; note = 2'-O-methyladenosine
  modified_base 12: mod_base = OTHER; note = 2'-O-methyluridine
  modified_base 13: mod_base = OTHER; note = 2'-O-methyladenosine
  modified_base 14: mod_base = OTHER; note = 2'-O-methyladenosine
  modified_base 15: mod_base = OTHER; note = 2'-O-methylcytidine
  modified_base 16: mod_base = OTHER; note = 2'-O-methyladenosine
  modified_base 17: mod_base = OTHER; note = 2'-O-methyladenosine
  modified_base 18: mod_base = OTHER; note = 2'-O-methyluridine
  modified_base 19: mod_base = OTHER; note = 2'-O-methyladenosine
  modified_base 20: mod_base = OTHER; note = 2'-O-methyluridine
  modified_base 21: mod_base = OTHER; note = 2'-O-methylguanosine
  modified_base 22: mod_base = OTHER; note = 2'-O-methylcytidine
  modified_base 23: mod_base = OTHER; note = 2'-O-methyluridine
  modified_base 24: mod_base = OTHER; note = 2'-O-methyladenosine
  modified_base 25: mod_base = OTHER; note = 2'-O-methyladenosine
  modified_base 26: mod_base = OTHER; note = 2'-O-methyladenosine
  modified_base 27: mod_base = OTHER; note = 2'-O-methyluridine
  modified_base 28: mod_base = OTHER; note = 2'-O-methylguanosine
  modified_base 29: mod_base = OTHER; note = 2'-O-methyluridine
  modified_base 30: mod_base = OTHER; note = 2'-O-methyluridine
  modified_base 31: mod_base = OTHER; note = 2'-O-methylguanosine
  modified_base 32: mod_base = OTHER; note = 2'-O-methyluridine
  modified_base 33: mod_base = OTHER; note = 2'-O-methyluridine
  modified_base 34: mod_base = OTHER; note = 2'-O-methyladenosine
  modified_base 35: mod_base = OTHER; note = 2'-O-methyluridine
  modified_base 36: mod_base = OTHER; note = 2'-O-methyladenosine
  modified_base 37: mod_base = OTHER; note = 2'-O-methylguanosine
  modified_base 38: mod_base = OTHER; note = 2'-O-methyluridine
  modified_base 39: mod_base = OTHER; note = 2'-O-methyladenosine
  modified_base 40: mod_base = OTHER; note = 2'-O-methyluridine
  modified_base 41: mod_base = OTHER; note = 2'-O-methylcytidine
  modified_base 42: mod_base = OTHER; note = 2'-O-methylcytidine
  modified_base 43: mod_base = OTHER; note = 2'-O-methylcytidine
  modified_base 44: mod_base = OTHER; note = 2'-O-methyladenosine
  modified_base 45: mod_base = OTHER; note = 2'-O-methylcytidine
  modified_base 46: mod_base = OTHER; note = 2'-O-methylguanosine
  modified_base 47: mod_base = OTHER; note = 2'-O-methylcytidine
  modified_base 48: mod_base = OTHER; note = 2'-O-methyladenosine
  modified_base 49: mod_base = OTHER; note = 2'-O-methylcytidine
  modified_base 50: mod_base = OTHER; note = 2'-O-methyladenosine
  modified_base 51: mod_base = OTHER; note = 2'-O-methylguanosine
  modified_base 55: mod_base = OTHER; note = 2'-O-methyladenosine
  modified_base 56: mod_base = OTHER; note = 2'-O-methylguanosine
  modified_base 57: mod_base = OTHER; note = 2'-O-methyladenosine
  modified_base 58: mod_base = OTHER; note = 2'-O-methyluridine
  modified_base 59: mod_base = OTHER; note = 2'-O-methyladenosine phosphorothioate
  modified_base 60: mod_base = OTHER; note = 2'-O-methylguanosine phosphorothioate
  modified_base 61: mod_base = OTHER; note = 2'-O-methyladenosine phosphorothioate
  modified_base 62: mod_base = OTHER; note = 2'-O-methyladenosine phosphorothioate
  modified_base 63: mod_base = OTHER; note = 2'-O-methylguanosine
  misc_feature 1..51: note = RNA
  misc_feature 52..54: note = DNA
  misc_feature 55..63: note = RNA
gtggaatagtataacaatatgctaaatgttgttatagtatcccacgcacagaccagatagaag

SEQ ID NO: 84 - DNA, 65 bp, synthetic construct
  source 1..65: mol_type = other DNA; note = Description of Artificial Sequence: Synthetic oligonucleotide; note = Description of Combined DNA/RNA Molecule: Synthetic oligonucleotide
  modified_base 1: mod_base = OTHER; note = 2'-O-methylguanosine phosphorothioate
  modified_base 2: mod_base = OTHER; note = 2'-O-methyluridine phosphorothioate
  modified_base 3: mod_base = OTHER; note = 2'-O-methylguanosine phosphorothioate
  modified_base 4: mod_base = OTHER; note = 2'-O-methylguanosine phosphorothioate
  modified_base 5: mod_base = OTHER; note = 2'-O-methyladenosine
  modified_base 6: mod_base = OTHER; note = 2'-O-methyladenosine
  modified_base 7: mod_base = OTHER; note = 2'-O-methyluridine
  modified_base 8: mod_base = OTHER; note = 2'-O-methyladenosine
  modified_base 9: mod_base = OTHER; note = 2'-O-methylguanosine
  modified_base 10: mod_base = OTHER; note = 2'-O-methyluridine
  modified_base 11: mod_base = OTHER; note = 2'-O-methyladenosine
  modified_base 12: mod_base = OTHER; note = 2'-O-methyluridine
  modified_base 13: mod_base = OTHER; note = 2'-O-methyladenosine
  modified_base 14: mod_base = OTHER; note = 2'-O-methyladenosine
  modified_base 15: mod_base = OTHER; note = 2'-O-methylcytidine
  modified_base 16: mod_base = OTHER; note = 2'-O-methyladenosine
  modified_base 17: mod_base = OTHER; note = 2'-O-methyladenosine
  modified_base 18: mod_base = OTHER; note = 2'-O-methyluridine
  modified_base 19: mod_base = OTHER; note = 2'-O-methyladenosine
  modified_base 20: mod_base = OTHER; note = 2'-O-methyluridine
  modified_base 21: mod_base = OTHER; note = 2'-O-methylguanosine
  modified_base 22: mod_base = OTHER; note = 2'-O-methylcytidine
  modified_base 23: mod_base = OTHER; note = 2'-O-methyluridine
  modified_base 24: mod_base = OTHER; note = 2'-O-methyladenosine
  modified_base 25: mod_base = OTHER; note = 2'-O-methyladenosine
  modified_base 26: mod_base = OTHER; note = 2'-O-methyladenosine
  modified_base 27: mod_base = OTHER; note = 2'-O-methyluridine
  modified_base 28: mod_base = OTHER; note = 2'-O-methylguanosine
  modified_base 29: mod_base = OTHER; note = 2'-O-methyluridine
  modified_base 30: mod_base = OTHER; note = 2'-O-methyluridine
  modified_base 31: mod_base = OTHER; note = 2'-O-methylguanosine
  modified_base 32: mod_base = OTHER; note = 2'-O-methyluridine
  modified_base 33: mod_base = OTHER; note = 2'-O-methyluridine
  modified_base 34: mod_base = OTHER; note = 2'-O-methyladenosine
  modified_base 35: mod_base = OTHER; note = 2'-O-methyluridine
  modified_base 36: mod_base = OTHER; note = 2'-O-methyladenosine
  modified_base 37: mod_base = OTHER; note = 2'-O-methylguanosine
  modified_base 38: mod_base = OTHER; note = 2'-O-methyluridine
  modified_base 39: mod_base = OTHER; note = 2'-O-methyladenosine
  modified_base 40: mod_base = OTHER; note = 2'-O-methyluridine
  modified_base 41: mod_base = OTHER; note = 2'-O-methylcytidine
  modified_base 42: mod_base = OTHER; note = 2'-O-methylcytidine
  modified_base 43: mod_base = OTHER; note = 2'-O-methylcytidine
  modified_base 44: mod_base = OTHER; note = 2'-O-methyladenosine
  modified_base 45: mod_base = OTHER; note = 2'-O-methylcytidine
  modified_base 46: mod_base = OTHER; note = 2'-O-methylguanosine
  modified_base 47: mod_base = OTHER; note = 2'-O-methylcytidine
  modified_base 48: mod_base = OTHER; note = 2'-O-methyladenosine
  modified_base 49: mod_base = OTHER; note = 2'-O-methylcytidine
  modified_base 50: mod_base = OTHER; note = 2'-O-methyladenosine
  modified_base 51: mod_base = OTHER; note = 2'-O-methylguanosine
  modified_base 55: mod_base = OTHER; note = 2'-O-methyladenosine
  modified_base 56: mod_base = OTHER; note = 2'-O-methylguanosine
  modified_base 57: mod_base = OTHER; note = 2'-O-methyladenosine
  modified_base 58: mod_base = OTHER; note = 2'-O-methyluridine
  modified_base 59: mod_base = OTHER; note = 2'-O-methyladenosine
  modified_base 60: mod_base = OTHER; note = 2'-O-methylguanosine
  modified_base 61: mod_base = OTHER; note = 2'-O-methyladenosine phosphorothioate
  modified_base 62: mod_base = OTHER; note = 2'-O-methyladenosine phosphorothioate
  modified_base 63: mod_base = OTHER; note = 2'-O-methylguanosine phosphorothioate
  modified_base 64: mod_base = OTHER; note = 2'-O-methyladenosine phosphorothioate
  modified_base 65: mod_base = OTHER; note = 2'-O-methylcytidine
  misc_feature 1..51: note = RNA
  misc_feature 52..54: note = DNA
  misc_feature 55..65: note = RNA
gtggaatagtataacaatatgctaaatgttgttatagtatcccacgcacagaccagatagaagac

SEQ ID NO: 85 - DNA, 63 bp, synthetic construct
  source 1..63: mol_type = other DNA; note = Description of Artificial Sequence: Synthetic oligonucleotide; note = Description of Combined DNA/RNA Molecule: Synthetic oligonucleotide
  modified_base 1: mod_base = OTHER; note = 2'-O-methylguanosine phosphorothioate
  modified_base 2: mod_base = OTHER; note = 2'-O-methylguanosine phosphorothioate
  modified_base 3: mod_base = OTHER; note = 2'-O-methyluridine phosphorothioate
  modified_base 4: mod_base = OTHER; note = 2'-O-methylguanosine phosphorothioate
  modified_base 5: mod_base = OTHER; note = 2'-O-methyladenosine
  modified_base 6: mod_base = OTHER; note = 2'-O-methyladenosine
  modified_base 7: mod_base = OTHER; note = 2'-O-methylguanosine
  modified_base 8: mod_base = OTHER; note = 2'-O-methyladenosine
  modified_base 9: mod_base = OTHER; note = 2'-O-methylguanosine
  modified_base 10: mod_base = OTHER; note = 2'-O-methylguanosine
  modified_base 11: mod_base = OTHER; note = 2'-O-methyladenosine
  modified_base 12: mod_base = OTHER; note = 2'-O-methylguanosine
  modified_base 13: mod_base = OTHER; note = 2'-O-methyladenosine
  modified_base 14: mod_base = OTHER; note = 2'-O-methyladenosine
  modified_base 15: mod_base = OTHER; note = 2'-O-methylcytidine
  modified_base 16: mod_base = OTHER; note = 2'-O-methyladenosine
  modified_base 17: mod_base = OTHER; note = 2'-O-methyladenosine
  modified_base 18: mod_base = OTHER; note = 2'-O-methyluridine
  modified_base 19: mod_base = OTHER; note = 2'-O-methyladenosine
  modified_base 20: mod_base = OTHER; note = 2'-O-methyluridine
  modified_base 21: mod_base = OTHER; note = 2'-O-methylguanosine
  modified_base 22: mod_base = OTHER; note = 2'-O-methylcytidine
  modified_base 23: mod_base = OTHER; note = 2'-O-methyluridine
  modified_base 24: mod_base = OTHER; note = 2'-O-methyladenosine
  modified_base 25: mod_base = OTHER; note = 2'-O-methyladenosine
  modified_base 26: mod_base = OTHER; note = 2'-O-methyladenosine
  modified_base 27: mod_base = OTHER; note = 2'-O-methyluridine
  modified_base 28: mod_base = OTHER; note = 2'-O-methylguanosine
  modified_base 29: mod_base = OTHER; note = 2'-O-methyluridine
  modified_base 30: mod_base = OTHER; note = 2'-O-methyluridine
  modified_base 31: mod_base = OTHER; note = 2'-O-methylguanosine
  modified_base 32: mod_base = OTHER; note = 2'-O-methyluridine
  modified_base 33: mod_base = OTHER; note = 2'-O-methyluridine
  modified_base 34: mod_base = OTHER; note = 2'-O-methylcytidine
  modified_base 35: mod_base = OTHER; note = 2'-O-methyluridine
  modified_base 36: mod_base = OTHER; note = 2'-O-methylcytidine
  modified_base 37: mod_base = OTHER; note = 2'-O-methylguanosine
  modified_base 38: mod_base = OTHER; note = 2'-O-methyluridine
  modified_base 39: mod_base = OTHER; note = 2'-O-methylcytidine
  modified_base 40: mod_base = OTHER; note = 2'-O-methyluridine
  modified_base 41: mod_base = OTHER; note = 2'-O-methylcytidine
  modified_base 42: mod_base = OTHER; note = 2'-O-methylcytidine
  modified_base 43: mod_base = OTHER; note = 2'-O-methyladenosine
  modified_base 44: mod_base = OTHER; note = 2'-O-methylcytidine
  modified_base 45: mod_base = OTHER; note = 2'-O-methylcytidine
  modified_base 46: mod_base = OTHER; note = 2'-O-methylguanosine
  modified_base 47: mod_base = OTHER; note = 2'-O-methylcytidine
  modified_base 48: mod_base = OTHER; note = 2'-O-methyladenosine
  modified_base 49: mod_base = OTHER; note = 2'-O-methylcytidine
  modified_base 50: mod_base = OTHER; note = 2'-O-methyladenosine
  modified_base 51: mod_base = OTHER; note = 2'-O-methylguanosine
  modified_base 55: mod_base = OTHER; note = 2'-O-methyladenosine
  modified_base 56: mod_base = OTHER; note = 2'-O-methylguanosine
  modified_base 57: mod_base = OTHER; note = 2'-O-methyladenosine
  modified_base 58: mod_base = OTHER; note = 2'-O-methyluridine
  modified_base 59: mod_base = OTHER; note = 2'-O-methyladenosine phosphorothioate
  modified_base 60: mod_base = OTHER; note = 2'-O-methylguanosine phosphorothioate
  modified_base 61: mod_base = OTHER; note = 2'-O-methyladenosine phosphorothioate
  modified_base 62: mod_base = OTHER; note = 2'-O-methyladenosine phosphorothioate
  modified_base 63: mod_base = OTHER; note = 2'-O-methylguanosine
  misc_feature 1..51: note = RNA
  misc_feature 52..54: note = DNA
  misc_feature 55..63: note = RNA
ggtgaagaggagaacaatatgctaaatgttgttctcgtctccaccgcacagaccagatagaag

SEQ ID NO: 86 - DNA, 73 bp, synthetic construct
  source 1..73: mol_type = other DNA; note = Description of Artificial Sequence: Synthetic oligonucleotide; note = Description of Combined DNA/RNA Molecule: Synthetic oligonucleotide
  modified_base 1: mod_base = OTHER; note = 2'-O-methylguanosine phosphorothioate
  modified_base 2: mod_base = OTHER; note = 2'-O-methylguanosine phosphorothioate
  modified_base 3: mod_base = OTHER; note = 2'-O-methyluridine phosphorothioate
  modified_base 4: mod_base = OTHER; note = 2'-O-methylguanosine phosphorothioate
  modified_base 5: mod_base = OTHER; note = 2'-O-methyluridine
  modified_base 6: mod_base = OTHER; note = 2'-O-methylcytidine
  modified_base 7: mod_base = OTHER; note = 2'-O-methylguanosine
  modified_base 8: mod_base = OTHER; note = 2'-O-methyladenosine
  modified_base 9: mod_base = OTHER; note = 2'-O-methylguanosine
  modified_base 10: mod_base = OTHER; note = 2'-O-methyladenosine
  modified_base 11: mod_base = OTHER; note = 2'-O-methyladenosine
  modified_base 12: mod_base = OTHER; note = 2'-O-methylguanosine
  modified_base 13: mod_base = OTHER; note = 2'-O-methyladenosine
  modified_base 14: mod_base = OTHER; note = 2'-O-methylguanosine
  modified_base 15: mod_base = OTHER; note = 2'-O-methylguanosine
  modified_base 16: mod_base = OTHER; note = 2'-O-methyladenosine
  modified_base 17: mod_base = OTHER; note = 2'-O-methylguanosine
  modified_base 18: mod_base = OTHER; note = 2'-O-methyladenosine
  modified_base 19: mod_base = OTHER; note = 2'-O-methyladenosine
  modified_base 20: mod_base = OTHER; note = 2'-O-methylcytidine
  modified_base 21: mod_base = OTHER; note = 2'-O-methyladenosine
  modified_base 22: mod_base = OTHER; note = 2'-O-methyladenosine
  modified_base 23: mod_base = OTHER; note = 2'-O-methyluridine
  modified_base 24: mod_base = OTHER; note = 2'-O-methyladenosine
  modified_base 25: mod_base = OTHER; note = 2'-O-methyluridine
  modified_base 26: mod_base = OTHER; note = 2'-O-methylguanosine
  modified_base 27: mod_base = OTHER; note = 2'-O-methylcytidine
  modified_base 28: mod_base = OTHER; note = 2'-O-methyluridine
  modified_base 29: mod_base = OTHER; note = 2'-O-methyladenosine
  modified_base 30: mod_base = OTHER; note = 2'-O-methyladenosine
  modified_base 31: mod_base = OTHER; note = 2'-O-methyladenosine
  modified_base 32: mod_base = OTHER; note = 2'-O-methyluridine
  modified_base 33: mod_base = OTHER; note = 2'-O-methylguanosine
  modified_base 34: mod_base = OTHER; note = 2'-O-methyluridine
  modified_base 35: mod_base = OTHER; note = 2'-O-methyluridine
  modified_base 36: mod_base = OTHER; note = 2'-O-methylguanosine
  modified_base 37: mod_base = OTHER; note = 2'-O-methyluridine
  modified_base 38: mod_base = OTHER; note = 2'-O-methyluridine
  modified_base 39: mod_base = OTHER; note = 2'-O-methylcytidine
  modified_base 40: mod_base = OTHER; note = 2'-O-methyluridine
  modified_base 41: mod_base = OTHER; note = 2'-O-methylcytidine
  modified_base 42: mod_base = OTHER; note = 2'-O-methylguanosine
  modified_base 43: mod_base = OTHER; note = 2'-O-methyluridine
  modified_base 44: mod_base = OTHER; note = 2'-O-methylcytidine
  modified_base 45: mod_base = OTHER; note = 2'-O-methyluridine
  modified_base 46: mod_base = OTHER; note = 2'-O-methylcytidine
  modified_base 47: mod_base = OTHER; note = 2'-O-methylcytidine
  modified_base 48: mod_base = OTHER; note = 2'-O-methyluridine
  modified_base 49: mod_base = OTHER; note = 2'-O-methylcytidine
  modified_base 50: mod_base = OTHER; note = 2'-O-methylguanosine
  modified_base 51: mod_base = OTHER; note = 2'-O-methyladenosine
  modified_base 52: mod_base = OTHER; note = 2'-O-methylcytidine
  modified_base 53: mod_base = OTHER; note = 2'-O-methyladenosine
  modified_base 54: mod_base = OTHER; note = 2'-O-methylcytidine
  modified_base 55: mod_base = OTHER; note = 2'-O-methylcytidine
  modified_base 56: mod_base = OTHER; note = 2'-O-methylguanosine
  modified_base 57: mod_base = OTHER; note = 2'-O-methylcytidine
  modified_base 58: mod_base = OTHER; note = 2'-O-methyladenosine
  modified_base 59: mod_base = OTHER; note = 2'-O-methylcytidine
  modified_base 60: mod_base = OTHER; note = 2'-O-methyladenosine
  modified_base 61: mod_base = OTHER; note = 2'-O-methylguanosine
  modified_base 65: mod_base = OTHER; note = 2'-O-methyladenosine
  modified_base 66: mod_base = OTHER; note = 2'-O-methylguanosine
  modified_base 67: mod_base = OTHER; note = 2'-O-methyladenosine
  modified_base 68: mod_base = OTHER; note = 2'-O-methyluridine
  modified_base 69: mod_base = OTHER; note = 2'-O-methyladenosine phosphorothioate
  modified_base 70: mod_base = OTHER; note = 2'-O-methylguanosine phosphorothioate
  modified_base 71: mod_base = OTHER; note = 2'-O-methyladenosine phosphorothioate
  modified_base 72: mod_base = OTHER; note = 2'-O-methyladenosine phosphorothioate
  modified_base 73: mod_base = OTHER; note = 2'-O-methylguanosine
  misc_feature 1..61: note = RNA
  misc_feature 62..64: note = DNA
  misc_feature 65..73: note = RNA
ggtgtcgagaagaggagaacaatatgctaaatgttgttctcgtctcctcgacaccgcacagaccagatagaag

SEQ ID NO: 87 - DNA, 50 bp, synthetic construct
  source 1..50: mol_type = other DNA; note = Description of Artificial Sequence: Synthetic oligonucleotide; note = Description of Combined DNA/RNA Molecule: Synthetic oligonucleotide
  modified_base 1: mod_base = OTHER; note = 2'-O-methylguanosine phosphorothioate
  modified_base 2: mod_base = OTHER; note = 2'-O-methylcytidine phosphorothioate
  modified_base 3: mod_base = OTHER; note = 2'-O-methylguanosine phosphorothioate
  modified_base 4: mod_base = OTHER; note = 2'-O-methylcytidine phosphorothioate
  modified_base 5: mod_base = OTHER; note = 2'-O-methyluridine
  modified_base 6: mod_base = OTHER; note = 2'-O-methyluridine
  modified_base 7: mod_base = OTHER; note = 2'-O-methylcytidine
  modified_base 8: mod_base = OTHER; note = 2'-O-methyluridine
  modified_base 9: mod_base = OTHER; note = 2'-O-methyluridine
  modified_base 10: mod_base = OTHER; note = 2'-O-methylguanosine
  modified_base 11: mod_base = OTHER; note = 2'-O-methyladenosine
  modified_base 12: mod_base = OTHER; note = 2'-O-methyluridine
  modified_base 13: mod_base = OTHER; note = 2'-O-methylguanosine
  modified_base 14: mod_base = OTHER; note = 2'-O-methylguanosine
  modified_base 15: mod_base = OTHER; note = 2'-O-methylguanosine
  modified_base 16: mod_base = OTHER; note = 2'-O-methylguanosine
  modified_base 17: mod_base = OTHER; note = 2'-O-methyladenosine
  modified_base 18: mod_base = OTHER; note = 2'-O-methylguanosine
  modified_base 19: mod_base = OTHER; note = 2'-O-methyluridine
  modified_base 20: mod_base = OTHER; note = 2'-O-methyladenosine
  modified_base 21: mod_base = OTHER; note = 2'-O-methylcytidine
  modified_base 22: mod_base = OTHER; note = 2'-O-methylguanosine
  modified_base 23: mod_base = OTHER; note = 2'-O-methylguanosine
  modified_base 24: mod_base = OTHER; note = 2'-O-methyluridine
  modified_base 25: mod_base = OTHER; note = 2'-O-methylcytidine
  modified_base 26: mod_base = OTHER; note = 2'-O-methyluridine
  modified_base 27: mod_base = OTHER; note = 2'-O-methylcytidine
  modified_base 28: mod_base = OTHER; note = 2'-O-methylcytidine
  modified_base 29: mod_base = OTHER; note = 2'-O-methyluridine
  modified_base 30: mod_base = OTHER; note = 2'-O-methylguanosine
  modified_base 31: mod_base = OTHER; note = 2'-O-methylcytidine
  modified_base 32: mod_base = OTHER; note = 2'-O-methyladenosine
  modified_base 33: mod_base = OTHER; note = 2'-O-methylcytidine
  modified_base 34: mod_base = OTHER; note = 2'-O-methyladenosine
  modified_base 35: mod_base = OTHER; note = 2'-O-methylguanosine
  modified_base 39: mod_base = OTHER; note = 2'-O-methyladenosine
  modified_base 40: mod_base = OTHER; note = 2'-O-methylguanosine
  modified_base 41: mod_base = OTHER; note = 2'-O-methyladenosine
  modified_base 42: mod_base = OTHER; note = 2'-O-methyluridine
  modified_base 43: mod_base = OTHER; note = 2'-O-methyladenosine
  modified_base 44: mod_base = OTHER; note = 2'-O-methylguanosine
  modified_base 45: mod_base = OTHER; note = 2'-O-methyladenosine
  modified_base 46: mod_base = OTHER; note = 2'-O-methyladenosine phosphorothioate
  modified_base 47: mod_base = OTHER; note = 2'-O-methylguanosine phosphorothioate
  modified_base 48: mod_base = OTHER; note = 2'-O-methyladenosine phosphorothioate
  modified_base 49: mod_base = OTHER; note = 2'-O-methylcytidine phosphorothioate
  modified_base 50: mod_base = OTHER; note = 2'-O-methyluridine
  misc_feature 1..35: note = RNA
  misc_feature 36..38: note = DNA
  misc_feature 39..50: note = RNA
gcgcttcttgatggggagtacggtctcctgcacagaccagatagaagact

SEQ ID NO: 88 - DNA, 50 bp, synthetic construct
  source 1..50: mol_type = other DNA; note = Description of Artificial Sequence: Synthetic oligonucleotide; note = Description of Combined DNA/RNA Molecule: Synthetic oligonucleotide
  modified_base 1: mod_base = OTHER; note = 2'-O-methylguanosine phosphorothioate
  modified_base 2: mod_base = OTHER; note = 2'-O-methylcytidine phosphorothioate
  modified_base 3: mod_base = OTHER; note = 2'-O-methylguanosine phosphorothioate
  modified_base 4: mod_base = OTHER; note = 2'-O-methylcytidine phosphorothioate
  modified_base 5: mod_base = OTHER; note = 2'-O-methyluridine
  modified_base 6: mod_base = OTHER; note = 2'-O-methyluridine
  modified_base 7: mod_base = OTHER; note = 2'-O-methylcytidine
  modified_base 8: mod_base = OTHER; note = 2'-O-methyluridine
  modified_base 9: mod_base = OTHER; note = 2'-O-methyluridine
  modified_base 10: mod_base = OTHER; note = 2'-O-methylguanosine
  modified_base 11: mod_base = OTHER; note = 2'-O-methyladenosine
  modified_base 12: mod_base = OTHER; note = 2'-O-methyluridine
  modified_base 13: mod_base = OTHER; note = 2'-O-methylguanosine
  modified_base 14: mod_base = OTHER; note = 2'-O-methylguanosine
  modified_base 15: mod_base = OTHER; note = 2'-O-methylguanosine
  modified_base 16: mod_base = OTHER; note = 2'-O-methylguanosine
  modified_base 17: mod_base = OTHER; note = 2'-O-methyladenosine
  modified_base 18: mod_base = OTHER; note = 2'-O-methylguanosine
  modified_base 19: mod_base = OTHER; note = 2'-O-methyluridine
  modified_base 20: mod_base = OTHER; note = 2'-O-methyladenosine
  modified_base 21: mod_base = OTHER; note = 2'-O-methylguanosine
  modified_base 22: mod_base = OTHER; note = 2'-O-methylguanosine
  modified_base 23: mod_base = OTHER; note = 2'-O-methylguanosine
  modified_base 24: mod_base = OTHER; note = 2'-O-methyluridine
  modified_base 25: mod_base = OTHER; note = 2'-O-methylguanosine
  modified_base 26: mod_base = OTHER; note = 2'-O-methyluridine
  modified_base 27: mod_base = OTHER; note = 2'-O-methylcytidine
  modified_base 28: mod_base = OTHER; note = 2'-O-methylcytidine
  modified_base 29: mod_base = OTHER; note = 2'-O-methyluridine
  modified_base 30: mod_base = OTHER; note = 2'-O-methylguanosine
  modified_base 31: mod_base = OTHER; note = 2'-O-methylcytidine
  modified_base 32: mod_base = OTHER; note = 2'-O-methyladenosine
  modified_base 33: mod_base = OTHER; note = 2'-O-methylcytidine
  modified_base 34: mod_base = OTHER; note = 2'-O-methyladenosine
  modified_base 35: mod_base = OTHER; note = 2'-O-methylguanosine
  modified_base 39: mod_base = OTHER; note = 2'-O-methyladenosine
  modified_base 40: mod_base = OTHER; note = 2'-O-methylguanosine
  modified_base 41: mod_base = OTHER; note = 2'-O-methyladenosine
  modified_base 42: mod_base = OTHER; note = 2'-O-methyluridine
  modified_base 43: mod_base = OTHER; note = 2'-O-methyladenosine
  modified_base 44: mod_base = OTHER; note = 2'-O-methylguanosine
  modified_base 45: mod_base = OTHER; note = 2'-O-methyladenosine
  modified_base 46: mod_base = OTHER; note = 2'-O-methyladenosine phosphorothioate
  modified_base 47: mod_base = OTHER; note = 2'-O-methylguanosine phosphorothioate
  modified_base 48: mod_base = OTHER; note = 2'-O-methyladenosine phosphorothioate
  modified_base 49: mod_base = OTHER; note = 2'-O-methylcytidine phosphorothioate
  modified_base 50: mod_base = OTHER; note = 2'-O-methyluridine
  misc_feature 1..35: note = RNA
  misc_feature 36..38: note = DNA
  misc_feature 39..50: note = RNA
gcgcttcttgatggggagtagggtgtcctgcacagaccagatagaagact

SEQ ID NO: 89 - DNA, 50 bp, synthetic construct
  source 1..50: mol_type = other DNA; note = Description of Artificial Sequence: Synthetic oligonucleotide; note = Description of Combined DNA/RNA Molecule: Synthetic oligonucleotide
  modified_base 1: mod_base = OTHER; note = 2'-O-methylguanosine phosphorothioate
  modified_base 2: mod_base = OTHER; note = 2'-O-methylcytidine phosphorothioate
  modified_base 3: mod_base = OTHER; note = 2'-O-methylguanosine phosphorothioate
  modified_base 4: mod_base = OTHER; note = 2'-O-methylcytidine phosphorothioate
  modified_base 5: mod_base = OTHER; note = 2'-O-methyluridine
  modified_base 6: mod_base = OTHER; note = 2'-O-methyluridine
  modified_base 7: mod_base = OTHER; note = 2'-O-methylcytidine
  modified_base 8: mod_base = OTHER; note = 2'-O-methyluridine
  modified_base 9: mod_base = OTHER; note = 2'-O-methyluridine
  modified_base 10: mod_base = OTHER; note = 2'-O-methylguanosine
  modified_base 11: mod_base = OTHER; note = 2'-O-methyladenosine
  modified_base 12: mod_base = OTHER; note = 2'-O-methyluridine
  modified_base 13: mod_base = OTHER; note = 2'-O-methylguanosine
  modified_base 14: mod_base = OTHER; note = 2'-O-methylguanosine
  modified_base 15: mod_base = OTHER; note = 2'-O-methylguanosine
  modified_base 16: mod_base = OTHER; note = 2'-O-methylguanosine
  modified_base 17: mod_base = OTHER; note = 2'-O-methyladenosine
  modified_base 18: mod_base = OTHER; note = 2'-O-methylguanosine
  modified_base 19: mod_base = OTHER; note = 2'-O-methyluridine
  modified_base 20: mod_base = OTHER; note = 2'-O-methylcytidine
  modified_base 21: mod_base = OTHER; note = 2'-O-methylcytidine
  modified_base 22: mod_base = OTHER; note = 2'-O-methylguanosine
  modified_base 23: mod_base = OTHER; note = 2'-O-methylguanosine
  modified_base 24: mod_base = OTHER; note = 2'-O-methylcytidine
  modified_base 25: mod_base = OTHER; note = 2'-O-methylcytidine
  modified_base 26: mod_base = OTHER; note = 2'-O-methyluridine
  modified_base 27: mod_base = OTHER; note = 2'-O-methylcytidine
  modified_base 28: mod_base = OTHER; note = 2'-O-methylcytidine
  modified_base 29: mod_base = OTHER; note = 2'-O-methyluridine
  modified_base 30: mod_base = OTHER; note = 2'-O-methylguanosine
  modified_base 31: mod_base = OTHER; note = 2'-O-methylcytidine
  modified_base 32: mod_base = OTHER; note = 2'-O-methyladenosine
  modified_base 33: mod_base = OTHER; note = 2'-O-methylcytidine
  modified_base 34: mod_base = OTHER; note = 2'-O-methyladenosine
  modified_base 35: mod_base = OTHER; note = 2'-O-methylguanosine
  modified_base 39: mod_base = OTHER; note = 2'-O-methyladenosine
  modified_base 40: mod_base = OTHER; note = 2'-O-methylguanosine
  modified_base 41: mod_base = OTHER; note = 2'-O-methyladenosine
  modified_base 42: mod_base = OTHER; note = 2'-O-methyluridine
  modified_base 43: mod_base = OTHER; note = 2'-O-methyladenosine
  modified_base 44: mod_base = OTHER; note = 2'-O-methylguanosine
  modified_base 45: mod_base = OTHER; note = 2'-O-methyladenosine
  modified_base 46: mod_base = OTHER; note = 2'-O-methyladenosine phosphorothioate
  modified_base 47: mod_base = OTHER; note = 2'-O-methylguanosine phosphorothioate
  modified_base 48: mod_base = OTHER; note = 2'-O-methyladenosine phosphorothioate
  modified_base 49: mod_base = OTHER; note = 2'-O-methylcytidine phosphorothioate
  modified_base 50: mod_base = OTHER; note = 2'-O-methyluridine
  misc_feature 1..35: note = RNA
  misc_feature 36..38: note = DNA
  misc_feature 39..50: note = RNA
gcgcttcttgatggggagtccggcctcctgcacagaccagatagaagact

SEQ ID NO: 90 - DNA, 50 bp, synthetic construct
  source 1..50: mol_type = other DNA; note = Description of Artificial Sequence: Synthetic oligonucleotide; note = Description of Combined DNA/RNA Molecule: Synthetic oligonucleotide
  modified_base 1: mod_base = OTHER; note = 2'-O-methylguanosine phosphorothioate
  modified_base 2: mod_base = OTHER; note = 2'-O-methylcytidine phosphorothioate
  modified_base 3: mod_base = OTHER; note = 2'-O-methylguanosine phosphorothioate
  modified_base 4: mod_base = OTHER; note = 2'-O-methylcytidine phosphorothioate
  modified_base 5: mod_base = OTHER; note = 2'-O-methyluridine
  modified_base 6: mod_base = OTHER; note = 2'-O-methyluridine
  modified_base 7: mod_base = OTHER; note = 2'-O-methylcytidine
  modified_base 8: mod_base = OTHER; note = 2'-O-methyluridine
  modified_base 9: mod_base = OTHER; note = 2'-O-methyluridine
  modified_base 10: mod_base = OTHER; note = 2'-O-methylguanosine
  modified_base 11: mod_base = OTHER; note = 2'-O-methyladenosine
  modified_base 12: mod_base = OTHER; note = 2'-O-methyluridine
  modified_base 13: mod_base = OTHER; note = 2'-O-methylguanosine
  modified_base 14: mod_base = OTHER; note = 2'-O-methylguanosine
  modified_base 15: mod_base = OTHER; note = 2'-O-methylguanosine
  modified_base 16: mod_base = OTHER; note = 2'-O-methylguanosine
  modified_base 17: mod_base = OTHER; note = 2'-O-methyladenosine
  modified_base 18: mod_base = OTHER; note = 2'-O-methyladenosine
  modified_base 19: mod_base = OTHER; note = 2'-O-methyluridine
  modified_base 20: mod_base = OTHER; note = 2'-O-methyladenosine
  modified_base 21: mod_base = OTHER; note = 2'-O-methylcytidine
  modified_base 22: mod_base = OTHER; note = 2'-O-methyladenosine
  modified_base 23: mod_base = OTHER; note = 2'-O-methylguanosine
  modified_base 24: mod_base = OTHER; note = 2'-O-methyluridine
  modified_base 25: mod_base = OTHER; note = 2'-O-methylcytidine
  modified_base 26: mod_base = OTHER; note = 2'-O-methyluridine
  modified_base 27: mod_base = OTHER; note = 2'-O-methylcytidine
  modified_base 28: mod_base = OTHER; note = 2'-O-methylcytidine
  modified_base 29: mod_base = OTHER; note = 2'-O-methyluridine
  modified_base 30: mod_base = OTHER; note = 2'-O-methylguanosine
  modified_base 31: mod_base = OTHER; note = 2'-O-methylcytidine
  modified_base 32: mod_base = OTHER; note = 2'-O-methyladenosine
  modified_base 33: mod_base = OTHER; note = 2'-O-methylcytidine
  modified_base 34: mod_base = OTHER; note = 2'-O-methyladenosine
  modified_base 35: mod_base = OTHER; note = 2'-O-methylguanosine
  modified_base 39: mod_base = OTHER; note = 2'-O-methyladenosine
  modified_base 40: mod_base = OTHER; note = 2'-O-methylguanosine
  modified_base 41: mod_base = OTHER; note = 2'-O-methyladenosine
  modified_base 42: mod_base = OTHER; note = 2'-O-methyluridine
  modified_base 43: mod_base = OTHER; note = 2'-O-methyladenosine
  modified_base 44: mod_base = OTHER; note = 2'-O-methylguanosine
  modified_base 45: mod_base = OTHER; note = 2'-O-methyladenosine
  modified_base 46: mod_base = OTHER; note = 2'-O-methyladenosine phosphorothioate
  modified_base 47: mod_base = OTHER; note = 2'-O-methylguanosine phosphorothioate
  modified_base 48: mod_base = OTHER; note = 2'-O-methyladenosine phosphorothioate
  modified_base 49: mod_base = OTHER; note = 2'-O-methylcytidine phosphorothioate
  modified_base 50: mod_base = OTHER; note = 2'-O-methyluridine
  misc_feature 1..35: note = RNA
  misc_feature 36..38: note = DNA
  misc_feature 39..50: note = RNA
gcgcttcttgatggggaatacagtctcctgcacagaccagatagaagact

SEQ ID NO: 91 - DNA, 50 bp, synthetic construct
  source 1..50: mol_type = other DNA; note = Description of Artificial Sequence: Synthetic oligonucleotide; note = Description of Combined DNA/RNA Molecule: Synthetic oligonucleotide
  modified_base 1: mod_base = OTHER; note = 2'-O-methylguanosine phosphorothioate
  modified_base 2: mod_base = OTHER; note = 2'-O-methylcytidine phosphorothioate
  modified_base 3: mod_base = OTHER; note = 2'-O-methylguanosine phosphorothioate
  modified_base 4: mod_base = OTHER; note = 2'-O-methylcytidine phosphorothioate
  modified_base 5: mod_base = OTHER; note = 2'-O-methyluridine
  modified_base 6: mod_base = OTHER; note = 2'-O-methyluridine
  modified_base 7: mod_base = OTHER; note = 2'-O-methylcytidine
  modified_base 8: mod_base = OTHER; note = 2'-O-methyluridine
  modified_base 9: mod_base = OTHER; note = 2'-O-methyluridine
  modified_base 10: mod_base = OTHER; note = 2'-O-methylguanosine
  modified_base 11: mod_base = OTHER; note = 2'-O-methyladenosine
  modified_base 12: mod_base = OTHER; note = 2'-O-methyluridine
  modified_base 13: mod_base = OTHER; note = 2'-O-methylguanosine
  modified_base 14: mod_base = OTHER; note = 2'-O-methylguanosine
  modified_base 15: mod_base = OTHER; note = 2'-O-methylguanosine
  modified_base 16: mod_base = OTHER; note = 2'-O-methyladenosine
  modified_base 17: mod_base = OTHER; note = 2'-O-methyladenosine
  modified_base 18: mod_base = OTHER; note = 2'-O-methylguanosine
  modified_base 19: mod_base = OTHER; note = 2'-O-methyluridine
  modified_base 20: mod_base = OTHER; note = 2'-O-methylcytidine
  modified_base 21: mod_base = OTHER; note = 2'-O-methylcytidine
  modified_base 22: mod_base = OTHER; note = 2'-O-methylguanosine
  modified_base 23: mod_base = OTHER; note = 2'-O-methylguanosine
  modified_base 24: mod_base = OTHER; note = 2'-O-methyluridine
  modified_base 25: mod_base = OTHER; note = 2'-O-methylcytidine
  modified_base 26: mod_base = OTHER; note = 2'-O-methyluridine
  modified_base 27: mod_base = OTHER; note = 2'-O-methylcytidine
  modified_base 28: mod_base = OTHER; note = 2'-O-methylcytidine
  modified_base 29: mod_base = OTHER; note = 2'-O-methyluridine
  modified_base 30: mod_base = OTHER; note = 2'-O-methylguanosine
  modified_base 31: mod_base = OTHER; note = 2'-O-methylcytidine
  modified_base 32: mod_base = OTHER; note = 2'-O-methyladenosine
  modified_base 33: mod_base = OTHER; note = 2'-O-methylcytidine
  modified_base 34: mod_base = OTHER; note = 2'-O-methyladenosine
  modified_base 35: mod_base = OTHER; note = 2'-O-methylguanosine
  modified_base 39: mod_base = OTHER; note = 2'-O-methyladenosine
  modified_base 40: mod_base = OTHER; note = 2'-O-methylguanosine
  modified_base 41: mod_base = OTHER; note = 2'-O-methyladenosine
  modified_base 42: mod_base = OTHER; note = 2'-O-methyluridine
  modified_base 43: mod_base = OTHER; note = 2'-O-methyladenosine
  modified_base 44: mod_base = OTHER; note = 2'-O-methylguanosine
  modified_base 45: mod_base = OTHER; note = 2'-O-methyladenosine
  modified_base 46: mod_base = OTHER; note = 2'-O-methyladenosine phosphorothioate
  modified_base 47: mod_base = OTHER; note = 2'-O-methylguanosine phosphorothioate
  modified_base 48: mod_base = OTHER; note = 2'-O-methyladenosine phosphorothioate
  modified_base 49: mod_base = OTHER; note = 2'-O-methylcytidine phosphorothioate
  modified_base 50: mod_base = OTHER; note = 2'-O-methyluridine
  misc_feature 1..35: note = RNA
  misc_feature 36..38: note = DNA
  misc_feature 39..50: note = RNA
gcgcttcttgatgggaagtccggtctcctgcacagaccagatagaagact

SEQ ID NO: 92 - DNA, 50 bp, synthetic construct
  source 1..50: mol_type = other DNA; note = Description of Artificial Sequence: Synthetic oligonucleotide; note = Description of Combined DNA/RNA Molecule: Synthetic oligonucleotide
  modified_base 1: mod_base = OTHER; note = 2'-O-methylguanosine phosphorothioate
  modified_base 2: mod_base = OTHER; note = 2'-O-methylcytidine phosphorothioate
  modified_base 3: mod_base = OTHER; note = 2'-O-methylguanosine phosphorothioate
  modified_base 4: mod_base = OTHER; note = 2'-O-methylcytidine phosphorothioate
  modified_base 5: mod_base = OTHER; note = 2'-O-methyluridine
  modified_base 6: mod_base = OTHER; note = 2'-O-methyluridine
  modified_base 7: mod_base = OTHER; note = 2'-O-methylcytidine
  modified_base 8: mod_base = OTHER; note = 2'-O-methyluridine
  modified_base 9: mod_base = OTHER; note = 2'-O-methyluridine
  modified_base 10: mod_base = OTHER; note = 2'-O-methylguanosine
  modified_base 11: mod_base = OTHER; note = 2'-O-methyladenosine
  modified_base 12: mod_base = OTHER; note = 2'-O-methyluridine
  modified_base 13: mod_base = OTHER; note = 2'-O-methylguanosine
  modified_base 14: mod_base = OTHER; note = 2'-O-methylguanosine
  modified_base 15: mod_base = OTHER; note = 2'-O-methyladenosine
  modified_base 16: mod_base = OTHER; note = 2'-O-methylguanosine
  modified_base 17: mod_base = OTHER; note = 2'-O-methyladenosine
  modified_base 18: mod_base = OTHER; note = 2'-O-methylguanosine
  modified_base 19: mod_base = OTHER; note = 2'-O-methylcytidine
  modified_base 20: mod_base = OTHER; note = 2'-O-methyladenosine
  modified_base 21: mod_base = OTHER; note = 2'-O-methylcytidine
  modified_base 22: mod_base = OTHER; note = 2'-O-methylguanosine
  modified_base 23: mod_base = OTHER; note = 2'-O-methylguanosine
  modified_base 24: mod_base = OTHER; note = 2'-O-methyluridine
  modified_base 25: mod_base = OTHER; note = 2'-O-methylcytidine
  modified_base 26: mod_base = OTHER; note = 2'-O-methyluridine
  modified_base 27: mod_base = OTHER; note = 2'-O-methylcytidine
  modified_base 28: mod_base = OTHER; note = 2'-O-methylcytidine
  modified_base 29: mod_base = OTHER; note = 2'-O-methyluridine
  modified_base 30: mod_base = OTHER; note = 2'-O-methylguanosine
  modified_base 31: mod_base = OTHER; note = 2'-O-methylcytidine
  modified_base 32: mod_base = OTHER; note = 2'-O-methyladenosine
  modified_base 33: mod_base = OTHER; note = 2'-O-methylcytidine
  modified_base 34: mod_base = OTHER; note = 2'-O-methyladenosine
  modified_base 35: mod_base = OTHER; note = 2'-O-methylguanosine
  modified_base 39: mod_base = OTHER; note = 2'-O-methyladenosine
  modified_base 40: mod_base = OTHER; note = 2'-O-methylguanosine
  modified_base 41: mod_base = OTHER; note = 2'-O-methyladenosine
  modified_base 42: mod_base = OTHER; note = 2'-O-methyluridine
  modified_base 43: mod_base = OTHER; note = 2'-O-methyladenosine
  modified_base 44: mod_base = OTHER; note = 2'-O-methylguanosine
  modified_base 45: mod_base = OTHER; note = 2'-O-methyladenosine
  modified_base 46: mod_base = OTHER; note = 2'-O-methyladenosine phosphorothioate
  modified_base 47: mod_base = OTHER; note = 2'-O-methylguanosine phosphorothioate
  modified_base 48: mod_base = OTHER; note = 2'-O-methyladenosine phosphorothioate
  modified_base 49: mod_base = OTHER; note = 2'-O-methylcytidine phosphorothioate
  modified_base 50: mod_base = OTHER; note = 2'-O-methyluridine
  misc_feature 1..35: note = RNA
  misc_feature 36..38: note = DNA
  misc_feature 39..50: note = RNA
gcgcttcttgatggagagcacggtctcctgcacagaccagatagaagact

SEQ ID NO: 93 - DNA, 50 bp, synthetic construct; identical to SEQ ID NO: 91
  source 1..50: mol_type = other DNA; note = Description of Artificial Sequence: Synthetic oligonucleotide; note = Description of Combined DNA/RNA Molecule: Synthetic oligonucleotide
  modified_base 1: mod_base = OTHER; note = 2'-O-methylguanosine phosphorothioate
  modified_base 2: mod_base = OTHER; note = 2'-O-methylcytidine phosphorothioate
  modified_base 3: mod_base = OTHER; note = 2'-O-methylguanosine phosphorothioate
  modified_base 4: mod_base = OTHER; note = 2'-O-methylcytidine phosphorothioate
  modified_base 5: mod_base = OTHER; note = 2'-O-methyluridine
  modified_base 6: mod_base = OTHER; note = 2'-O-methyluridine
  modified_base 7: mod_base = OTHER; note = 2'-O-methylcytidine
  modified_base 8: mod_base = OTHER; note = 2'-O-methyluridine
  modified_base 9: mod_base = OTHER; note = 2'-O-methyluridine
  modified_base 10: mod_base = OTHER; note = 2'-O-methylguanosine
  modified_base 11: mod_base = OTHER; note = 2'-O-methyladenosine
  modified_base 12: mod_base = OTHER; note = 2'-O-methyluridine
  modified_base 13: mod_base = OTHER; note = 2'-O-methylguanosine
  modified_base 14: mod_base = OTHER; note = 2'-O-methylguanosine
  modified_base 15: mod_base = OTHER; note = 2'-O-methylguanosine
  modified_base 16: mod_base = OTHER; note = 2'-O-methyladenosine
  modified_base 17: mod_base = OTHER; note = 2'-O-methyladenosine
  modified_base 18: mod_base = OTHER; note = 2'-O-methylguanosine
  modified_base 19: mod_base = OTHER; note = 2'-O-methyluridine
  modified_base 20: mod_base = OTHER; note = 2'-O-methylcytidine
  modified_base 21: mod_base = OTHER; note = 2'-O-methylcytidine
  modified_base 22: mod_base = OTHER; note = 2'-O-methylguanosine
  modified_base 23: mod_base = OTHER; note = 2'-O-methylguanosine
  modified_base 24: mod_base = OTHER; note = 2'-O-methyluridine
  modified_base 25: mod_base = OTHER; note = 2'-O-methylcytidine
  modified_base 26: mod_base = OTHER; note = 2'-O-methyluridine
  modified_base 27: mod_base = OTHER; note = 2'-O-methylcytidine
  modified_base 28: mod_base = OTHER; note = 2'-O-methylcytidine
  modified_base 29: mod_base = OTHER; note = 2'-O-methyluridine
  modified_base 30: mod_base = OTHER; note = 2'-O-methylguanosine
  modified_base 31: mod_base = OTHER; note = 2'-O-methylcytidine
  modified_base 32: mod_base = OTHER; note = 2'-O-methyladenosine
  modified_base 33: mod_base = OTHER; note = 2'-O-methylcytidine
  modified_base 34: mod_base = OTHER; note = 2'-O-methyladenosine
  modified_base 35: mod_base = OTHER; note = 2'-O-methylguanosine
  modified_base 36: mod_base = OTHER; note = 2'-fluoroarabinoadenosine
  modified_base 39: mod_base = OTHER; note = 2'-O-methyladenosine
  modified_base 40: mod_base = OTHER; note = 2'-O-methylguanosine
  modified_base 41: mod_base = OTHER; note = 2'-O-methyladenosine
  modified_base 42: mod_base = OTHER; note = 2'-O-methyluridine
  modified_base 43: mod_base = OTHER; note = 2'-O-methyladenosine
  modified_base 44: mod_base = OTHER; note = 2'-O-methylguanosine
  modified_base 45: mod_base = OTHER; note = 2'-O-methyladenosine
  modified_base 46: mod_base = OTHER; note = 2'-O-methyladenosine phosphorothioate
  modified_base 47: mod_base = OTHER; note = 2'-O-methylguanosine phosphorothioate
  modified_base 48: mod_base = OTHER; note = 2'-O-methyladenosine phosphorothioate
  modified_base 49: mod_base = OTHER; note = 2'-O-methylcytidine phosphorothioate
  modified_base 50: mod_base = OTHER; note = 2'-O-methyluridine
  misc_feature 1..36: note = RNA
  misc_feature 37..38: note = DNA
  misc_feature 39..50: note = RNA

SEQ ID NO: 94 - DNA, 50 bp, synthetic construct; identical to SEQ ID NO: 91
  source 1..50: mol_type = other DNA; note = Description of Artificial Sequence: Synthetic oligonucleotide; note = Description of Combined DNA/RNA Molecule: Synthetic oligonucleotide
  modified_base 1: mod_base = OTHER; note = 2'-O-methylguanosine phosphorothioate
  modified_base 2: mod_base = OTHER; note = 2'-O-methylcytidine phosphorothioate
  modified_base 3: mod_base = OTHER; note = 2'-O-methylguanosine phosphorothioate
  modified_base 4: mod_base = OTHER; note = 2'-O-methylcytidine phosphorothioate
  modified_base 5: mod_base = OTHER; note = 2'-O-methyluridine
  modified_base 6: mod_base = OTHER; note = 2'-O-methyluridine
  modified_base 7: mod_base = OTHER; note = 2'-O-methylcytidine
  modified_base 8: mod_base = OTHER; note = 2'-O-methyluridine
  modified_base 9: mod_base = OTHER; note = 2'-O-methyluridine
  modified_base 10: mod_base = OTHER; note = 2'-O-methylguanosine
  modified_base 11: mod_base = OTHER; note = 2'-O-methyladenosine
  modified_base 12: mod_base = OTHER; note = 2'-O-methyluridine
  modified_base 13: mod_base = OTHER; note = 2'-O-methylguanosine
  modified_base 14: mod_base = OTHER; note = 2'-O-methylguanosine
  modified_base 15: mod_base = OTHER; note = 2'-O-methylguanosine
  modified_base 16: mod_base = OTHER; note = 2'-O-methyladenosine
  modified_base 17: mod_base = OTHER; note = 2'-O-methyladenosine
  modified_base 18: mod_base = OTHER; note = 2'-O-methylguanosine
  modified_base 19: mod_base = OTHER; note = 2'-O-methyluridine
  modified_base 20: mod_base = OTHER; note = 2'-O-methylcytidine
  modified_base 21: mod_base = OTHER; note = 2'-O-methylcytidine
  modified_base 22: mod_base = OTHER; note = 2'-O-methylguanosine
  modified_base 23: mod_base = OTHER; note = 2'-O-methylguanosine
  modified_base 24: mod_base = OTHER; note = 2'-O-methyluridine
  modified_base 25: mod_base = OTHER; note = 2'-O-methylcytidine
  modified_base 26: mod_base = OTHER; note = 2'-O-methyluridine
  modified_base 27: mod_base = OTHER; note = 2'-O-methylcytidine
  modified_base 28: mod_base = OTHER; note = 2'-O-methylcytidine
  modified_base 29: mod_base = OTHER; note = 2'-O-methyluridine
  modified_base 30: mod_base = OTHER; note = 2'-O-methylguanosine
  modified_base 31: mod_base = OTHER; note = 2'-O-methylcytidine
  modified_base 32: mod_base = OTHER; note = 2'-O-methyladenosine
  modified_base 33: mod_base = OTHER; note = 2'-O-methylcytidine
  modified_base 34: mod_base = OTHER; note = 2'-O-methyladenosine
  modified_base 35: mod_base = OTHER; note = 2'-O-methylguanosine
  modified_base 37: mod_base = OTHER; note = 2'-fluoroarabinocytidine
  modified_base 39: mod_base = OTHER; note = 2'-O-methyladenosine
  modified_base 40: mod_base = OTHER; note = 2'-O-methylguanosine
  modified_base 41: mod_base = OTHER; note = 2'-O-methyladenosine
  modified_base 42: mod_base = OTHER; note = 2'-O-methyluridine
  modified_base 43: mod_base = OTHER; note = 2'-O-methyladenosine
  modified_base 44: mod_base = OTHER; note = 2'-O-methylguanosine
  modified_base 45: mod_base = OTHER; note = 2'-O-methyladenosine
  modified_base 46: mod_base = OTHER; note = 2'-O-methyladenosine phosphorothioate
  modified_base 47: mod_base = OTHER; note = 2'-O-methylguanosine phosphorothioate
  modified_base 48: mod_base = OTHER; note = 2'-O-methyladenosine phosphorothioate
  modified_base 49: mod_base = OTHER; note = 2'-O-methylcytidine phosphorothioate
  modified_base 50: mod_base = OTHER; note = 2'-O-methyluridine
  misc_feature 1..35: note = RNA
  misc_feature 36: note = DNA
  misc_feature 37: note = RNA
  misc_feature 38: note = DNA
  misc_feature 39..50: note = RNA

SEQ ID NO: 95 - DNA, 50 bp, synthetic construct; identical to SEQ ID NO: 91
  source 1..50: mol_type = other DNA; note = Description of Artificial Sequence: Synthetic oligonucleotide; note = Description of Combined DNA/RNA Molecule: Synthetic oligonucleotide
  modified_base 1: mod_base = OTHER; note = 2'-O-methylguanosine phosphorothioate
  modified_base 2: mod_base = OTHER; note = 2'-O-methylcytidine phosphorothioate
  modified_base 3: mod_base = OTHER; note = 2'-O-methylguanosine phosphorothioate
  modified_base 4: mod_base = OTHER; note = 2'-O-methylcytidine phosphorothioate
  modified_base 5: mod_base = OTHER; note = 2'-O-methyluridine
  modified_base 6: mod_base = OTHER; note = 2'-O-methyluridine
  modified_base 7: mod_base = OTHER; note = 2'-O-methylcytidine
  modified_base 8: mod_base = OTHER; note = 2'-O-methyluridine
  modified_base 9: mod_base = OTHER; note = 2'-O-methyluridine
  modified_base 10: mod_base = OTHER; note = 2'-O-methylguanosine
  modified_base 11: mod_base = OTHER; note = 2'-O-methyladenosine
  modified_base 12: mod_base = OTHER; note = 2'-O-methyluridine
  modified_base 13: mod_base = OTHER; note = 2'-O-methylguanosine
  modified_base 14: mod_base = OTHER; note = 2'-O-methylguanosine
  modified_base 15: mod_base = OTHER; note = 2'-O-methylguanosine
  modified_base 16: mod_base = OTHER; note = 2'-O-methyladenosine
  modified_base 17: mod_base = OTHER; note = 2'-O-methyladenosine
  modified_base 18: mod_base = OTHER; note = 2'-O-methylguanosine
  modified_base 19: mod_base = OTHER; note = 2'-O-methyluridine
  modified_base 20: mod_base = OTHER; note = 2'-O-methylcytidine
  modified_base 21: mod_base = OTHER; note = 2'-O-methylcytidine
  modified_base 22: mod_base = OTHER; note = 2'-O-methylguanosine
  modified_base 23: mod_base = OTHER; note = 2'-O-methylguanosine
  modified_base 24: mod_base = OTHER; note = 2'-O-methyluridine
  modified_base 25: mod_base = OTHER; note = 2'-O-methylcytidine
  modified_base 26: mod_base = OTHER; note = 2'-O-methyluridine
  modified_base 27: mod_base = OTHER; note = 2'-O-methylcytidine
  modified_base 28: mod_base = OTHER; note = 2'-O-methylcytidine
  modified_base 29: mod_base = OTHER; note = 2'-O-methyluridine
  modified_base 30: mod_base = OTHER; note = 2'-O-methylguanosine
  modified_base 31: mod_base = OTHER; note = 2'-O-methylcytidine
  modified_base 32: mod_base = OTHER; note = 2'-O-methyladenosine
  modified_base 33: mod_base = OTHER; note = 2'-O-methylcytidine
  modified_base 34: mod_base = OTHER; note = 2'-O-methyladenosine
  modified_base 35: mod_base = OTHER; note = 2'-O-methylguanosine
  modified_base 38: mod_base = OTHER; note = 2'-fluoroarabinocytidine
  modified_base 39: mod_base = OTHER; note = 2'-O-methyladenosine
  modified_base 40: mod_base = OTHER; note = 2'-O-methylguanosine
  modified_base 41: mod_base = OTHER; note = 2'-O-methyladenosine
  modified_base 42: mod_base = OTHER; note = 2'-O-methyluridine
  modified_base 43: mod_base = OTHER; note = 2'-O-methyladenosine
  modified_base 44: mod_base = OTHER; note = 2'-O-methylguanosine
  modified_base 45: mod_base = OTHER; note = 2'-O-methyladenosine
  modified_base 46: mod_base = OTHER; note = 2'-O-methyladenosine phosphorothioate
  modified_base 47: mod_base = OTHER; note = 2'-O-methylguanosine phosphorothioate
  modified_base 48: mod_base = OTHER; note = 2'-O-methyladenosine phosphorothioate
  modified_base 49: mod_base = OTHER; note = 2'-O-methylcytidine phosphorothioate
  modified_base 50: mod_base = OTHER; note = 2'-O-methyluridine
  misc_feature 1..35: note = RNA
  misc_feature 36..37: note = DNA
  misc_feature 38..50: note = RNA

SEQ ID NO: 96 - RNA, 50 nt, synthetic construct
  source 1..50: mol_type = other RNA; note = Description of Artificial Sequence: Synthetic oligonucleotide
  modified_base 1: mod_base = OTHER; note = 2'-O-methylguanosine phosphorothioate
  modified_base 2: mod_base = OTHER; note = 2'-O-methylcytidine phosphorothioate
  modified_base 3: mod_base = OTHER; note = 2'-O-methylguanosine phosphorothioate
  modified_base 4: mod_base = OTHER; note = 2'-O-methylcytidine phosphorothioate
  modified_base 5: mod_base = OTHER; note = 2'-O-methyluridine
  modified_base 6: mod_base = OTHER; note = 2'-O-methyluridine
  modified_base 7: mod_base = OTHER; note = 2'-O-methylcytidine
  modified_base 8: mod_base = OTHER; note = 2'-O-methyluridine
  modified_base 9: mod_base = OTHER; note = 2'-O-methyluridine
  modified_base 10: mod_base = OTHER; note = 2'-O-methylguanosine
  modified_base 11: mod_base = OTHER; note = 2'-O-methyladenosine
  modified_base 12: mod_base = OTHER; note = 2'-O-methyluridine
  modified_base 13: mod_base = OTHER; note = 2'-O-methylguanosine
  modified_base 14: mod_base = OTHER; note = 2'-O-methylguanosine
  modified_base 15: mod_base = OTHER; note = 2'-O-methylguanosine
  modified_base 16: mod_base = OTHER; note = 2'-O-methyladenosine
  modified_base 17: mod_base = OTHER; note = 2'-O-methyladenosine
  modified_base 18: mod_base = OTHER; note = 2'-O-methylguanosine
  modified_base 19: mod_base = OTHER; note = 2'-O-methyluridine
  modified_base 20: mod_base = OTHER; note = 2'-O-methylcytidine
  modified_base 21: mod_base = OTHER; note = 2'-O-methylcytidine
  modified_base 22: mod_base = OTHER; note = 2'-O-methylguanosine
  modified_base 23: mod_base = OTHER; note = 2'-O-methylguanosine
  modified_base 24: mod_base = OTHER; note = 2'-O-methyluridine
  modified_base 25: mod_base = OTHER; note = 2'-O-methylcytidine
  modified_base 26: mod_base = OTHER; note = 2'-O-methyluridine
  modified_base 27: mod_base = OTHER; note = 2'-O-methylcytidine
  modified_base 28: mod_base = OTHER; note = 2'-O-methylcytidine
  modified_base 29: mod_base = OTHER; note = 2'-O-methyluridine
  modified_base 30: mod_base = OTHER; note = 2'-O-methylguanosine
  modified_base 31: mod_base = OTHER; note = 2'-O-methylcytidine
  modified_base 32: mod_base = OTHER; note = 2'-O-methyladenosine
  modified_base 33: mod_base = OTHER; note = 2'-O-methylcytidine
  modified_base 34: mod_base = OTHER; note = 2'-O-methyladenosine
  modified_base 35: mod_base = OTHER; note = 2'-O-methylguanosine
  modified_base 36: mod_base = OTHER; note = 2'-fluoroarabinoadenosine
  modified_base 37: mod_base = OTHER; note = 2'-fluoroarabinocytidine
  modified_base 38: mod_base = OTHER; note = 2'-fluoroarabinocytidine
  modified_base 39: mod_base = OTHER; note = 2'-O-methyladenosine
  modified_base 40: mod_base = OTHER; note = 2'-O-methylguanosine
  modified_base 41: mod_base = OTHER; note = 2'-O-methyladenosine
  modified_base 42: mod_base = OTHER; note = 2'-O-methyluridine
  modified_base 43: mod_base = OTHER; note = 2'-O-methyladenosine
  modified_base 44: mod_base = OTHER; note = 2'-O-methylguanosine
  modified_base 45: mod_base = OTHER; note = 2'-O-methyladenosine
  modified_base 46: mod_base = OTHER; note = 2'-O-methyladenosine phosphorothioate
  modified_base 47: mod_base = OTHER; note = 2'-O-methylguanosine phosphorothioate
  modified_base 48: mod_base = OTHER; note = 2'-O-methyladenosine phosphorothioate
  modified_base 49: mod_base = OTHER; note = 2'-O-methylcytidine phosphorothioate
  modified_base 50: mod_base = OTHER; note = 2'-O-methyluridine
gcgcttcttgatgggaagtccggtctcctgcacagaccagatagaagact

SEQ ID NO: 97 - DNA, 50 bp, synthetic construct; identical to SEQ ID NO: 91
  source 1..50: mol_type = other DNA; note = Description of Artificial Sequence: Synthetic oligonucleotide; note = Description of Combined DNA/RNA Molecule: Synthetic oligonucleotide
  modified_base 1: mod_base = OTHER; note = 2'-O-methylguanosine phosphorothioate
  modified_base 2: mod_base = OTHER; note = 2'-O-methylcytidine phosphorothioate
  modified_base 3: mod_base = OTHER; note = 2'-O-methylguanosine phosphorothioate
  modified_base 4: mod_base = OTHER; note = 2'-O-methylcytidine phosphorothioate
  modified_base 5: mod_base = OTHER; note = 2'-O-methyluridine
  modified_base 6: mod_base = OTHER; note = 2'-O-methyluridine
  modified_base 7: mod_base = OTHER; note = 2'-O-methylcytidine
  modified_base 8: mod_base = OTHER; note = 2'-O-methyluridine
  modified_base 9: mod_base = OTHER; note = 2'-O-methyluridine
  modified_base 10: mod_base = OTHER; note = 2'-O-methylguanosine
  modified_base 11: mod_base = OTHER; note = 2'-O-methyladenosine
  modified_base 12: mod_base = OTHER; note = 2'-O-methyluridine
  modified_base 13: mod_base = OTHER; note = 2'-O-methylguanosine
  modified_base 14: mod_base = OTHER; note = 2'-O-methylguanosine
  modified_base 15: mod_base = OTHER; note = 2'-O-methylguanosine
  modified_base 16: mod_base = OTHER; note = 2'-O-methyladenosine
  modified_base 17: mod_base = OTHER; note = 2'-O-methyladenosine
  modified_base 18: mod_base = OTHER; note = 2'-O-methylguanosine
  modified_base 19: mod_base = OTHER; note = 2'-O-methyluridine
  modified_base 20: mod_base = OTHER; note = 2'-O-methylcytidine
  modified_base 21: mod_base = OTHER; note = 2'-O-methylcytidine
  modified_base 22: mod_base = OTHER; note = 2'-O-methylguanosine
  modified_base 23: mod_base = OTHER; note = 2'-O-methylguanosine
  modified_base 24: mod_base = OTHER; note = 2'-O-methyluridine
  modified_base 25: mod_base = OTHER; note = 2'-O-methylcytidine
  modified_base 26: mod_base = OTHER; note = 2'-O-methyluridine
  modified_base 27: mod_base = OTHER; note = 2'-O-methylcytidine
  modified_base 28: mod_base = OTHER; note = 2'-O-methylcytidine
  modified_base 29: mod_base = OTHER; note = 2'-O-methyluridine
  modified_base 30: mod_base = OTHER; note = 2'-O-methylguanosine
  modified_base 31: mod_base = OTHER; note = 2'-O-methylcytidine
  modified_base 32: mod_base = OTHER; note = 2'-O-methyladenosine
  modified_base 33: mod_base = OTHER; note = 2'-O-methylcytidine
  modified_base 34: mod_base = OTHER; note = 2'-O-methyladenosine
  modified_base 35: mod_base = OTHER; note = 2'-O-methylguanosine
  modified_base 37: mod_base = OTHER; note = 2'-fluoroarabinocytidine
  modified_base 38: mod_base = OTHER; note = 2'-fluoroarabinocytidine
  modified_base 39: mod_base = OTHER; note = 2'-O-methyladenosine
  modified_base 40: mod_base = OTHER; note = 2'-O-methylguanosine
  modified_base 41: mod_base = OTHER; note = 2'-O-methyladenosine
  modified_base 42: mod_base = OTHER; note = 2'-O-methyluridine
  modified_base 43: mod_base = OTHER; note = 2'-O-methyladenosine
  modified_base 44: mod_base = OTHER; note = 2'-O-methylguanosine
  modified_base 45: mod_base = OTHER; note = 2'-O-methyladenosine
  modified_base 46: mod_base = OTHER; note = 2'-O-methyladenosine phosphorothioate
  modified_base 47: mod_base = OTHER; note = 2'-O-methylguanosine phosphorothioate
  modified_base 48: mod_base = OTHER; note = 2'-O-methyladenosine phosphorothioate
  modified_base 49: mod_base = OTHER; note = 2'-O-methylcytidine phosphorothioate
  modified_base 50: mod_base = OTHER; note = 2'-O-methyluridine
  misc_feature 1..35: note = RNA
  misc_feature 36: note = DNA
  misc_feature 37..50: note = RNA

SEQ ID NO: 98 - DNA, 50 bp, synthetic construct; identical to SEQ ID NO: 91
  source 1..50: mol_type = other DNA; note = Description of Artificial Sequence: Synthetic oligonucleotide; note = Description of Combined DNA/RNA Molecule: Synthetic oligonucleotide
  modified_base 1: mod_base = OTHER; note = 2'-O-methylguanosine phosphorothioate
  modified_base 2: mod_base = OTHER; note = 2'-O-methylcytidine phosphorothioate
  modified_base 3: mod_base = OTHER; note = 2'-O-methylguanosine phosphorothioate
  modified_base 4: mod_base = OTHER; note = 2'-O-methylcytidine phosphorothioate
  modified_base 5: mod_base = OTHER; note = 2'-O-methyluridine
  modified_base 6: mod_base = OTHER; note = 2'-O-methyluridine
  modified_base 7: mod_base = OTHER; note = 2'-O-methylcytidine
  modified_base 8: mod_base = OTHER; note = 2'-O-methyluridine
  modified_base 9: mod_base = OTHER; note = 2'-O-methyluridine
  modified_base 10: mod_base = OTHER; note = 2'-O-methylguanosine
  modified_base 11: mod_base = OTHER; note = 2'-O-methyladenosine
  modified_base 12: mod_base = OTHER; note = 2'-O-methyluridine
  modified_base 13: mod_base = OTHER; note = 2'-O-methylguanosine
  modified_base 14: mod_base = OTHER; note = 2'-O-methylguanosine
  modified_base 15: mod_base = OTHER; note = 2'-O-methylguanosine
  modified_base 16: mod_base = OTHER; note = 2'-O-methyladenosine
  modified_base 17: mod_base = OTHER; note = 2'-O-methyladenosine
  modified_base 18: mod_base = OTHER; note = 2'-O-methylguanosine
  modified_base 19: mod_base = OTHER; note = 2'-O-methyluridine
  modified_base 20: mod_base = OTHER; note = 2'-O-methylcytidine
  modified_base 21: mod_base = OTHER; note = 2'-O-methylcytidine
  modified_base 22: mod_base = OTHER; note = 2'-O-methylguanosine
  modified_base 23: mod_base = OTHER; note = 2'-O-methylguanosine
  modified_base 24: mod_base = OTHER; note = 2'-O-methyluridine
  modified_base 25: mod_base = OTHER; note = 2'-O-methylcytidine
  modified_base 26: mod_base = OTHER; note = 2'-O-methyluridine
  modified_base 27: mod_base = OTHER; note = 2'-O-methylcytidine
  modified_base 28: mod_base = OTHER; note = 2'-O-methylcytidine
  modified_base 29: mod_base = OTHER; note = 2'-O-methyluridine
  modified_base 30: mod_base = OTHER; note = 2'-O-methylguanosine
  modified_base 31: mod_base = OTHER; note = 2'-O-methylcytidine
  modified_base 32: mod_base = OTHER; note = 2'-O-methyladenosine
  modified_base 33: mod_base = OTHER; note = 2'-O-methylcytidine
  modified_base 34: mod_base = OTHER; note = 2'-O-methyladenosine
  modified_base 35: mod_base = OTHER; note = 2'-O-methylguanosine
  modified_base 36: mod_base = OTHER; note = 2'-fluoroarabinoadenosine
  modified_base 37: mod_base = OTHER; note = 2'-fluoroarabinocytidine
  modified_base 39: mod_base = OTHER; note = 2'-O-methyladenosine
  modified_base 40: mod_base = OTHER; note = 2'-O-methylguanosine
  modified_base 41: mod_base = OTHER; note = 2'-O-methyladenosine
  modified_base 42: mod_base = OTHER; note = 2'-O-methyluridine
  modified_base 43: mod_base = OTHER; note = 2'-O-methyladenosine
  modified_base 44: mod_base = OTHER; note = 2'-O-methylguanosine
  modified_base 45: mod_base = OTHER; note = 2'-O-methyladenosine
  modified_base 46: mod_base = OTHER; note = 2'-O-methyladenosine phosphorothioate
  modified_base 47: mod_base = OTHER; note = 2'-O-methylguanosine phosphorothioate
  modified_base 48: mod_base = OTHER; note = 2'-O-methyladenosine phosphorothioate
  modified_base 49: mod_base = OTHER; note = 2'-O-methylcytidine phosphorothioate
  modified_base 50: mod_base = OTHER; note = 2'-O-methyluridine
  misc_feature 1..37: note = RNA
  misc_feature 38: note = DNA
  misc_feature 39..50: note = RNA

SEQ ID NO: 99 - DNA, 20 bp, synthetic construct
  source 1..20: mol_type = other DNA; note = Description of Artificial Sequence: Synthetic primer
agaaaagtcctgggaagctc

SEQ ID NO: 100 - DNA, 20 bp, synthetic construct
  source 1..20: mol_type = other DNA; note = Description of Artificial Sequence: Synthetic primer
ggactctgagtggtggtgat

SEQ ID NO: 101 - DNA, 50 bp, synthetic construct; identical to SEQ ID NO: 87
  source 1..50: mol_type = other DNA; note = Description of Artificial Sequence: Synthetic oligonucleotide; note = Description of Combined DNA/RNA Molecule: Synthetic oligonucleotide
  modified_base 1: mod_base = OTHER; note = 2'-O-methylguanosine phosphorothioate
  modified_base 2: mod_base = OTHER; note = 2'-O-methylcytidine phosphorothioate
  modified_base 3: mod_base = OTHER; note = 2'-O-methylguanosine phosphorothioate
  modified_base 4: mod_base = OTHER; note = 2'-O-methylcytidine phosphorothioate
  modified_base 5: mod_base = OTHER; note = 2'-O-methyluridine
  modified_base 6: mod_base = OTHER; note = 2'-O-methyluridine
  modified_base 7: mod_base = OTHER; note = 2'-O-methylcytidine
  modified_base 8: mod_base = OTHER; note = 2'-O-methyluridine
  modified_base 9: mod_base = OTHER; note = 2'-O-methyluridine
  modified_base 10: mod_base = OTHER; note = 2'-O-methylguanosine
  modified_base 11: mod_base = OTHER; note = 2'-O-methyladenosine
  modified_base 12: mod_base = OTHER; note = 2'-O-methyluridine
  modified_base 13: mod_base = OTHER; note = 2'-O-methylguanosine
  modified_base 14: mod_base = OTHER; note = 2'-O-methylguanosine
  modified_base 15: mod_base = OTHER; note = 2'-O-methylguanosine
  modified_base 16: mod_base = OTHER; note = 2'-O-methylguanosine
  modified_base 17: mod_base = OTHER; note = 2'-O-methyladenosine
  modified_base 18: mod_base = OTHER; note = 2'-O-methylguanosine
  modified_base 19: mod_base = OTHER; note = 2'-O-methyluridine
  modified_base 20: mod_base = OTHER; note = 2'-O-methyladenosine
  modified_base 21: mod_base = OTHER; note = 2'-O-methylcytidine
  modified_base 22: mod_base = OTHER; note = 2'-O-methylguanosine
  modified_base 23: mod_base = OTHER; note = 2'-O-methylguanosine
  modified_base 24: mod_base = OTHER; note = 2'-O-methyluridine
  modified_base 25: mod_base = OTHER; note = 2'-O-methylcytidine
  modified_base 26: mod_base = OTHER; note = 2'-O-methyluridine
  modified_base 27: mod_base = OTHER; note = 2'-O-methylcytidine
  modified_base 28: mod_base = OTHER; note = 2'-O-methylcytidine
  modified_base 29: mod_base = OTHER; note = 2'-O-methyluridine
  modified_base 30: mod_base = OTHER; note = 2'-O-methylguanosine
  modified_base 31: mod_base = OTHER; note = 2'-O-methylcytidine
  modified_base 32: mod_base = OTHER; note = 2'-O-methyladenosine
  modified_base 33: mod_base = OTHER; note = 2'-O-methylcytidine
  modified_base 34: mod_base = OTHER; note = 2'-O-methyladenosine
  modified_base 35: mod_base = OTHER; note = 2'-O-methylguanosine
  modified_base 36: mod_base = OTHER; note = 2'-fluoroarabinoadenosine
  modified_base 39: mod_base = OTHER; note = 2'-O-methyladenosine
  modified_base 40: mod_base = OTHER; note = 2'-O-methylguanosine
  modified_base 41: mod_base = OTHER; note = 2'-O-methyladenosine
  modified_base 42: mod_base = OTHER; note = 2'-O-methyluridine
  modified_base 43: mod_base = OTHER; note = 2'-O-methyladenosine
  modified_base 44: mod_base = OTHER; note = 2'-O-methylguanosine
  modified_base 45: mod_base = OTHER; note = 2'-O-methyladenosine
  modified_base 46: mod_base = OTHER; note = 2'-O-methyladenosine phosphorothioate
  modified_base 47: mod_base = OTHER; note = 2'-O-methylguanosine phosphorothioate
  modified_base 48: mod_base = OTHER; note = 2'-O-methyladenosine phosphorothioate
  modified_base 49: mod_base = OTHER; note = 2'-O-methylcytidine phosphorothioate
  modified_base 50: mod_base = OTHER; note = 2'-O-methyluridine
  misc_feature 1..36: note = RNA
  misc_feature 37..38: note = DNA
  misc_feature 39..50: note = RNA

SEQ ID NO: 102 - DNA, 50 bp, synthetic construct; identical to SEQ ID NO: 87
  source 1..50: mol_type = other DNA; note = Description of Artificial Sequence: Synthetic oligonucleotide; note = Description of Combined DNA/RNA Molecule: Synthetic oligonucleotide
  modified_base 1: mod_base = OTHER; note = 2'-O-methylguanosine phosphorothioate
  modified_base 2: mod_base = OTHER; note = 2'-O-methylcytidine phosphorothioate
  modified_base 3: mod_base = OTHER; note = 2'-O-methylguanosine phosphorothioate
  modified_base 4: mod_base = OTHER; note = 2'-O-methylcytidine phosphorothioate
  modified_base 5: mod_base = OTHER; note = 2'-O-methyluridine
  modified_base 6: mod_base = OTHER; note = 2'-O-methyluridine
  modified_base 7: mod_base = OTHER; note = 2'-O-methylcytidine
  modified_base 8: mod_base = OTHER; note = 2'-O-methyluridine
  modified_base 9: mod_base = OTHER; note = 2'-O-methyluridine
  modified_base 10: mod_base = OTHER; note = 2'-O-methylguanosine
  modified_base 11: mod_base = OTHER; note = 2'-O-methyladenosine
  modified_base 12: mod_base = OTHER; note = 2'-O-methyluridine
  modified_base 13: mod_base = OTHER; note = 2'-O-methylguanosine
  modified_base 14: mod_base = OTHER; note = 2'-O-methylguanosine
  modified_base 15: mod_base = OTHER; note = 2'-O-methylguanosine
  modified_base 16: mod_base = OTHER; note = 2'-O-methylguanosine
  modified_base 17: mod_base = OTHER; note = 2'-O-methyladenosine
  modified_base 18: mod_base = OTHER; note = 2'-O-methylguanosine
  modified_base 19: mod_base = OTHER; note = 2'-O-methyluridine
  modified_base 20: mod_base = OTHER; note = 2'-O-methyladenosine
  modified_base 21: mod_base = OTHER; note = 2'-O-methylcytidine
  modified_base 22: mod_base = OTHER; note = 2'-O-methylguanosine
  modified_base 23: mod_base = OTHER; note = 2'-O-methylguanosine
  modified_base 24: mod_base = OTHER; note = 2'-O-methyluridine
  modified_base 25: mod_base = OTHER; note = 2'-O-methylcytidine
  modified_base 26: mod_base = OTHER; note = 2'-O-methyluridine
  modified_base 27: mod_base = OTHER; note = 2'-O-methylcytidine
  modified_base 28: mod_base = OTHER; note = 2'-O-methylcytidine
  modified_base 29: mod_base = OTHER; note = 2'-O-methyluridine
  modified_base 30: mod_base = OTHER; note = 2'-O-methylguanosine
  modified_base 31: mod_base = OTHER; note = 2'-O-methylcytidine
  modified_base 32: mod_base = OTHER; note = 2'-O-methyladenosine
  modified_base 33: mod_base = OTHER; note = 2'-O-methylcytidine
  modified_base 34: mod_base = OTHER; note = 2'-O-methyladenosine
  modified_base 35: mod_base = OTHER; note = 2'-O-methylguanosine
  modified_base 37: mod_base = OTHER; note = 2'-fluoroarabinocytidine
  modified_base 39: mod_base = OTHER; note = 2'-O-methyladenosine
  modified_base 40: mod_base = OTHER; note = 2'-O-methylguanosine
  modified_base 41: mod_base = OTHER; note = 2'-O-methyladenosine
  modified_base 42: mod_base = OTHER; note = 2'-O-methyluridine
  modified_base 43: mod_base = OTHER; note = 2'-O-methyladenosine
  modified_base 44: mod_base = OTHER; note = 2'-O-methylguanosine
  modified_base 45: mod_base = OTHER; note = 2'-O-methyladenosine
  modified_base 46: mod_base = OTHER; note = 2'-O-methyladenosine phosphorothioate
  modified_base 47: mod_base = OTHER; note = 2'-O-methylguanosine phosphorothioate
  modified_base 48: mod_base = OTHER; note = 2'-O-methyladenosine phosphorothioate
  modified_base 49: mod_base = OTHER; note = 2'-O-methylcytidine phosphorothioate
  modified_base 50: mod_base = OTHER; note = 2'-O-methyluridine
  misc_feature 1..35: note = RNA
  misc_feature 36: note = DNA
  misc_feature 37: note = RNA
  misc_feature 38: note = DNA
  misc_feature 39..50: note = RNA

SEQ ID NO: 103 - DNA, 50 bp, synthetic construct; identical to SEQ ID NO: 87
  source 1..50: mol_type = other DNA; note = Description of Artificial Sequence: Synthetic oligonucleotide; note = Description of Combined DNA/RNA Molecule: Synthetic oligonucleotide
  modified_base 1: mod_base = OTHER; note = 2'-O-methylguanosine phosphorothioate
  modified_base 2: mod_base = OTHER; note = 2'-O-methylcytidine phosphorothioate
  modified_base 3: mod_base = OTHER; note = 2'-O-methylguanosine phosphorothioate
  modified_base 4: mod_base = OTHER; note = 2'-O-methylcytidine phosphorothioate
  modified_base 5: mod_base = OTHER; note = 2'-O-methyluridine
  modified_base 6: mod_base = OTHER; note = 2'-O-methyluridine
  modified_base 7: mod_base = OTHER; note = 2'-O-methylcytidine
  modified_base 8: mod_base = OTHER; note = 2'-O-methyluridine
  modified_base 9: mod_base = OTHER; note = 2'-O-methyluridine
  modified_base 10: mod_base = OTHER; note = 2'-O-methylguanosine
  modified_base 11: mod_base = OTHER; note = 2'-O-methyladenosine
  modified_base 12: mod_base = OTHER; note = 2'-O-methyluridine
  modified_base 13: mod_base = OTHER; note = 2'-O-methylguanosine
  modified_base 14: mod_base = OTHER; note = 2'-O-methylguanosine
  modified_base 15: mod_base = OTHER; note = 2'-O-methylguanosine
  modified_base 16: mod_base = OTHER; note = 2'-O-methylguanosine
  modified_base 17: mod_base = OTHER; note = 2'-O-methyladenosine
  modified_base 18: mod_base = OTHER; note = 2'-O-methylguanosine
  modified_base 19: mod_base = OTHER; note = 2'-O-methyluridine
  modified_base 20: mod_base = OTHER; note = 2'-O-methyladenosine
  modified_base 21: mod_base = OTHER; note = 2'-O-methylcytidine
  modified_base 22: mod_base = OTHER; note = 2'-O-methylguanosine
  modified_base 23: mod_base = OTHER; note = 2'-O-methylguanosine
  modified_base 24: mod_base = OTHER; note = 2'-O-methyluridine
  modified_base 25: mod_base = OTHER; note = 2'-O-methylcytidine
  modified_base 26: mod_base = OTHER; note = 2'-O-methyluridine
  modified_base 27: mod_base = OTHER; note = 2'-O-methylcytidine
  modified_base 28: mod_base = OTHER; note = 2'-O-methylcytidine
  modified_base 29: mod_base = OTHER; note = 2'-O-methyluridine
  modified_base 30: mod_base = OTHER; note = 2'-O-methylguanosine
  modified_base 31: mod_base = OTHER; note = 2'-O-methylcytidine
  modified_base 32: mod_base = OTHER; note = 2'-O-methyladenosine
  modified_base 33: mod_base = OTHER; note = 2'-O-methylcytidine
  modified_base 34: mod_base = OTHER; note = 2'-O-methyladenosine
  modified_base 35: mod_base = OTHER; note = 2'-O-methylguanosine
  modified_base 38: mod_base = OTHER; note = 2'-fluoroarabinocytidine
  modified_base 39: mod_base = OTHER; note = 2'-O-methyladenosine
  modified_base 40: mod_base = OTHER; note = 2'-O-methylguanosine
  modified_base 41: mod_base = OTHER; note = 2'-O-methyladenosine
  modified_base 42: mod_base = OTHER; note = 2'-O-methyluridine
  modified_base 43: mod_base = OTHER; note = 2'-O-methyladenosine
  modified_base 44: mod_base = OTHER; note = 2'-O-methylguanosine
  modified_base 45: mod_base = OTHER; note = 2'-O-methyladenosine
  modified_base 46: mod_base = OTHER; note = 2'-O-methyladenosine phosphorothioate
  modified_base 47: mod_base = OTHER; note = 2'-O-methylguanosine phosphorothioate
  modified_base 48: mod_base = OTHER; note = 2'-O-methyladenosine phosphorothioate
  modified_base 49: mod_base = OTHER; note = 2'-O-methylcytidine phosphorothioate
  modified_base 50: mod_base = OTHER; note = 2'-O-methyluridine
  misc_feature 1..35: note = RNA
  misc_feature 36..37: note = DNA
  misc_feature 38..50: note = RNA

SEQ ID NO: 104 - DNA, 50 bp, synthetic construct; identical to SEQ ID NO: 87
  source 1..50: mol_type = other DNA; note = Description of Artificial Sequence: Synthetic oligonucleotide; note = Description of Combined DNA/RNA Molecule: Synthetic oligonucleotide
  modified_base 1: mod_base = OTHER; note = 2'-O-methylguanosine phosphorothioate
  modified_base 2: mod_base = OTHER; note = 2'-O-methylcytidine phosphorothioate
  modified_base 3: mod_base = OTHER; note = 2'-O-methylguanosine phosphorothioate
  modified_base 4: mod_base = OTHER; note = 2'-O-methylcytidine phosphorothioate
  modified_base 5: mod_base = OTHER; note = 2'-O-methyluridine
  modified_base 6: mod_base = OTHER; note = 2'-O-methyluridine
  modified_base 7: mod_base = OTHER; note = 2'-O-methylcytidine
  modified_base 8: mod_base = OTHER; note = 2'-O-methyluridine
  modified_base 9: mod_base = OTHER; note = 2'-O-methyluridine
  modified_base 10: mod_base = OTHER; note = 2'-O-methylguanosine
  modified_base 11: mod_base = OTHER; note = 2'-O-methyladenosine
  modified_base 12: mod_base = OTHER; note = 2'-O-methyluridine
  modified_base 13: mod_base = OTHER; note = 2'-O-methylguanosine
  modified_base 14: mod_base = OTHER; note = 2'-O-methylguanosine
  modified_base 15: mod_base = OTHER; note = 2'-O-methylguanosine
  modified_base 16: mod_base = OTHER; note = 2'-O-methylguanosine
  modified_base 17: mod_base = OTHER; note = 2'-O-methyladenosine
  modified_base 18: mod_base = OTHER; note = 2'-O-methylguanosine
  modified_base 19: mod_base = OTHER; note = 2'-O-methyluridine
  modified_base 20: mod_base = OTHER; note = 2'-O-methyladenosine
  modified_base 21: mod_base = OTHER; note = 2'-O-methylcytidine
  modified_base 22: mod_base = OTHER; note = 2'-O-methylguanosine
  modified_base 23: mod_base = OTHER; note = 2'-O-methylguanosine
  modified_base 24: mod_base = OTHER; note = 2'-O-methyluridine
  modified_base 25: mod_base = OTHER; note = 2'-O-methylcytidine
  modified_base 26: mod_base = OTHER; note = 2'-O-methyluridine
  modified_base 27: mod_base = OTHER; note = 2'-O-methylcytidine
  modified_base 28: mod_base = OTHER; note = 2'-O-methylcytidine
  modified_base 29: mod_base = OTHER; note = 2'-O-methyluridine
  modified_base 30: mod_base = OTHER; note = 2'-O-methylguanosine
  modified_base 31: mod_base = OTHER; note = 2'-O-methylcytidine
  modified_base 32: mod_base = OTHER; note = 2'-O-methyladenosine
  modified_base 33: mod_base = OTHER; note = 2'-O-methylcytidine
  modified_base 34: mod_base = OTHER; note = 2'-O-methyladenosine
  modified_base 35: mod_base = OTHER; note = 2'-O-methylguanosine
  modified_base 37: mod_base = OTHER; note = 2'-fluoroarabinocytidine
  modified_base 38: mod_base = OTHER; note = 2'-fluoroarabinocytidine
  modified_base 39: mod_base = OTHER; note = 2'-O-methyladenosine
  modified_base 40: mod_base = OTHER; note = 2'-O-methylguanosine
  modified_base 41: mod_base = OTHER; note = 2'-O-methyladenosine
  modified_base 42: mod_base = OTHER; note = 2'-O-methyluridine
  modified_base 43: mod_base = OTHER; note = 2'-O-methyladenosine
  modified_base 44: mod_base = OTHER; note = 2'-O-methylguanosine
  modified_base 45: mod_base = OTHER; note = 2'-O-methyladenosine
  modified_base 46: mod_base = OTHER; note = 2'-O-methyladenosine phosphorothioate
  modified_base 47: mod_base = OTHER; note = 2'-O-methylguanosine phosphorothioate
  modified_base 48: mod_base = OTHER; note = 2'-O-methyladenosine phosphorothioate
  modified_base 49: mod_base = OTHER; note = 2'-O-methylcytidine phosphorothioate
  modified_base 50: mod_base = OTHER; note = 2'-O-methyluridine
  misc_feature 1..35: note = RNA
  misc_feature 36: note = DNA
  misc_feature 37..50: note = RNA

SEQ ID NO: 105 - DNA, 50 bp, synthetic construct; identical to SEQ ID NO: 87
  source 1..50: mol_type = other DNA; note = Description of Artificial Sequence: Synthetic oligonucleotide; note = Description of Combined DNA/RNA Molecule: Synthetic oligonucleotide
  modified_base 1: mod_base = OTHER; note = 2'-O-methylguanosine phosphorothioate
  modified_base 2: mod_base = OTHER; note = 2'-O-methylcytidine phosphorothioate
  modified_base 3: mod_base = OTHER; note = 2'-O-methylguanosine phosphorothioate
  modified_base 4: mod_base = OTHER; note = 2'-O-methylcytidine phosphorothioate
  modified_base 5: mod_base = OTHER; note = 2'-O-methyluridine
  modified_base 6: mod_base = OTHER; note = 2'-O-methyluridine
  modified_base 7: mod_base = OTHER; note = 2'-O-methylcytidine
  modified_base 8: mod_base = OTHER; note = 2'-O-methyluridine
  modified_base 9: mod_base = OTHER; note = 2'-O-methyluridine
  modified_base 10: mod_base = OTHER; note = 2'-O-methylguanosine
  modified_base 11: mod_base = OTHER; note = 2'-O-methyladenosine
  modified_base 12: mod_base = OTHER; note = 2'-O-methyluridine
  modified_base 13: mod_base = OTHER; note = 2'-O-methylguanosine
  modified_base 14: mod_base = OTHER; note = 2'-O-methylguanosine
  modified_base 15: mod_base = OTHER; note = 2'-O-methylguanosine
  modified_base 16: mod_base = OTHER; note = 2'-O-methylguanosine
  modified_base 17: mod_base = OTHER; note = 2'-O-methyladenosine
  modified_base 18: mod_base = OTHER; note = 2'-O-methylguanosine
  modified_base 19: mod_base = OTHER; note = 2'-O-methyluridine
  modified_base 20: mod_base = OTHER; note = 2'-O-methyladenosine
  modified_base 21: mod_base = OTHER; note = 2'-O-methylcytidine
  modified_base 22: mod_base = OTHER; note = 2'-O-methylguanosine
  modified_base 23: mod_base = OTHER; note = 2'-O-methylguanosine
  modified_base 24: mod_base = OTHER; note = 2'-O-methyluridine
  modified_base 25: mod_base = OTHER; note = 2'-O-methylcytidine
  modified_base 26: mod_base = OTHER; note = 2'-O-methyluridine
  modified_base 27: mod_base = OTHER; note = 2'-O-methylcytidine
  modified_base 28: mod_base = OTHER; note = 2'-O-methylcytidine
  modified_base 29: mod_base = OTHER; note = 2'-O-methyluridine
  modified_base 30: mod_base = OTHER; note = 2'-O-methylguanosine
  modified_base 31: mod_base = OTHER; note = 2'-O-methylcytidine
  modified_base 32: mod_base = OTHER; note = 2'-O-methyladenosine
  modified_base 33: mod_base = OTHER; note = 2'-O-methylcytidine
  modified_base 34: mod_base = OTHER; note = 2'-O-methyladenosine
  modified_base 35: mod_base = OTHER; note = 2'-O-methylguanosine
  modified_base 36: mod_base = OTHER; note = 2'-fluoroarabinoadenosine
  modified_base 37: mod_base = OTHER; note = 2'-fluoroarabinocytidine
  modified_base 39: mod_base = OTHER; note = 2'-O-methyladenosine
  modified_base 40: mod_base = OTHER; note = 2'-O-methylguanosine
  modified_base 41: mod_base = OTHER; note = 2'-O-methyladenosine
  modified_base 42: mod_base = OTHER; note = 2'-O-methyluridine
  modified_base 43: mod_base = OTHER; note = 2'-O-methyladenosine
  modified_base 44: mod_base = OTHER; note = 2'-O-methylguanosine
  modified_base 45: mod_base = OTHER; note = 2'-O-methyladenosine
  modified_base 46: mod_base = OTHER; note = 2'-O-methyladenosine phosphorothioate
  modified_base 47: mod_base = OTHER; note = 2'-O-methylguanosine phosphorothioate
  modified_base 48: mod_base = OTHER; note = 2'-O-methyladenosine phosphorothioate
  modified_base 49: mod_base = OTHER; note = 2'-O-methylcytidine phosphorothioate
  modified_base 50: mod_base = OTHER; note = 2'-O-methyluridine
  misc_feature 1..37: note = RNA
  misc_feature 38: note = DNA
  misc_feature 39..50: note = RNA

SEQ ID NO: 106 - RNA, 50 nt, synthetic construct
  source 1..50: mol_type = other RNA; note = Description of Artificial Sequence: Synthetic oligonucleotide
  modified_base 1: mod_base = OTHER; note = 2'-O-methylguanosine phosphorothioate
  modified_base 2: mod_base = OTHER; note = 2'-O-methylcytidine phosphorothioate
  modified_base 3: mod_base = OTHER; note = 2'-O-methylguanosine phosphorothioate
  modified_base 4: mod_base = OTHER; note = 2'-O-methylcytidine phosphorothioate
  modified_base 5: mod_base = OTHER; note = 2'-O-methyluridine
  modified_base 6: mod_base = OTHER; note = 2'-O-methyluridine
  modified_base 7: mod_base = OTHER; note = 2'-O-methylcytidine
  modified_base 8: mod_base = OTHER; note = 2'-O-methyluridine
  modified_base 9: mod_base = OTHER; note = 2'-O-methyluridine
  modified_base 10: mod_base = OTHER; note = 2'-O-methylguanosine
  modified_base 11: mod_base = OTHER; note = 2'-O-methyladenosine
  modified_base 12: mod_base = OTHER; note = 2'-O-methyluridine
  modified_base 13: mod_base = OTHER; note = 2'-O-methylguanosine
  modified_base 14: mod_base = OTHER; note = 2'-O-methylguanosine
  modified_base 15: mod_base = OTHER; note = 2'-O-methylguanosine
  modified_base 16: mod_base = OTHER; note = 2'-O-methylguanosine
  modified_base 17: mod_base = OTHER; note = 2'-O-methyladenosine
  modified_base 18: mod_base = OTHER; note = 2'-O-methylguanosine
  modified_base 19: mod_base = OTHER; note = 2'-O-methyluridine
  modified_base 20: mod_base = OTHER; note = 2'-O-methyladenosine
  modified_base 21: mod_base = OTHER; note = 2'-O-methylcytidine
  modified_base 22: mod_base = OTHER; note = 2'-O-methylguanosine
  modified_base 23: mod_base = OTHER; note = 2'-O-methylguanosine
  modified_base 24: mod_base = OTHER; note = 2'-O-methyluridine
  modified_base 25: mod_base = OTHER; note = 2'-O-methylcytidine
  modified_base 26: mod_base = OTHER; note = 2'-O-methyluridine
  modified_base 27: mod_base = OTHER; note = 2'-O-methylcytidine
  modified_base 28: mod_base = OTHER; note = 2'-O-methylcytidine
  modified_base 29: mod_base = OTHER; note = 2'-O-methyluridine
  modified_base 30: mod_base = OTHER; note = 2'-O-methylguanosine
  modified_base 31: mod_base = OTHER; note = 2'-O-methylcytidine
  modified_base 32: mod_base = OTHER; note = 2'-O-methyladenosine
  modified_base 33: mod_base = OTHER; note = 2'-O-methylcytidine
  modified_base 34: mod_base = OTHER; note = 2'-O-methyladenosine
  modified_base 35: mod_base = OTHER; note = 2'-O-methylguanosine
  modified_base 36: mod_base = OTHER; note = 2'-fluoroarabinoadenosine
  modified_base 37: mod_base = OTHER; note = 2'-fluoroarabinocytidine
  modified_base 38: mod_base = OTHER; note = 2'-fluoroarabinocytidine
  modified_base 39: mod_base = OTHER; note = 2'-O-methyladenosine
  modified_base 40: mod_base = OTHER; note = 2'-O-methylguanosine
  modified_base 41: mod_base = OTHER; note = 2'-O-methyladenosine
  modified_base 42: mod_base = OTHER; note = 2'-O-methyluridine
  modified_base 43: mod_base = OTHER; note = 2'-O-methyladenosine
  modified_base 44: mod_base = OTHER; note = 2'-O-methylguanosine
  modified_base 45: mod_base = OTHER; note = 2'-O-methyladenosine
  modified_base 46: mod_base = OTHER; note = 2'-O-methyladenosine phosphorothioate
  modified_base 47: mod_base = OTHER; note = 2'-O-methylguanosine phosphorothioate
  modified_base 48: mod_base = OTHER; note = 2'-O-methyladenosine phosphorothioate
  modified_base 49: mod_base = OTHER; note = 2'-O-methylcytidine phosphorothioate
  modified_base 50: mod_base = OTHER; note = 2'-O-methyluridine
gcgcttcttgatggggagtacggtctcctgcacagaccagatagaagact

SEQ ID NO: 107 - DNA, 50 bp, synthetic construct; identical to SEQ ID NO: 87
  source 1..50: mol_type = other DNA; note = Description of Artificial Sequence: Synthetic oligonucleotide; note = Description of Combined DNA/RNA Molecule: Synthetic oligonucleotide
  modified_base 1: mod_base = OTHER; note = 2'-O-methylguanosine phosphorothioate
  modified_base 2: mod_base = OTHER; note = 2'-O-methylcytidine phosphorothioate
  modified_base 3: mod_base = OTHER; note = 2'-O-methylguanosine phosphorothioate
  modified_base 4: mod_base = OTHER; note = 2'-O-methylcytidine phosphorothioate
  modified_base 5: mod_base = OTHER; note = 2'-O-methyluridine
  modified_base 6: mod_base = OTHER; note = 2'-O-methyluridine
  modified_base 7: mod_base = OTHER; note = 2'-O-methylcytidine
  modified_base 8: mod_base = OTHER; note = 2'-O-methyluridine
  modified_base 9: mod_base = OTHER; note = 2'-O-methyluridine
  modified_base 10: mod_base = OTHER; note = 2'-O-methylguanosine
  modified_base 11: mod_base = OTHER; note = 2'-O-methyladenosine
  modified_base 12: mod_base = OTHER; note = 2'-O-methyluridine
  modified_base 13: mod_base = OTHER; note = 2'-O-methylguanosine
  modified_base 14: mod_base = OTHER; note = 2'-O-methylguanosine
  modified_base 15: mod_base = OTHER; note = 2'-O-methylguanosine
  modified_base 16: mod_base = OTHER; note = 2'-O-methylguanosine
  modified_base 17: mod_base = OTHER; note = 2'-O-methyladenosine
  modified_base 18: mod_base = OTHER; note = 2'-O-methylguanosine
  modified_base 19: mod_base = OTHER; note = 2'-O-methyluridine
  modified_base 20: mod_base = OTHER; note = 2'-O-methyladenosine
  modified_base 21: mod_base = OTHER; note = 2'-O-methylcytidine
  modified_base 22: mod_base = OTHER; note = 2'-O-methylguanosine
  modified_base 23: mod_base = OTHER; note = 2'-O-methylguanosine
  modified_base 24: mod_base = OTHER; note = 2'-O-methyluridine
  modified_base 25: mod_base = OTHER; note = 2'-O-methylcytidine
  modified_base 26: mod_base = OTHER; note = 2'-O-methyluridine
  modified_base 27: mod_base = OTHER; note = 2'-O-methylcytidine
  modified_base 28: mod_base = OTHER; note = 2'-O-methylcytidine
  modified_base 29: mod_base = OTHER; note = 2'-O-methyluridine
  modified_base 30: mod_base = OTHER; note = 2'-O-methylguanosine
  modified_base 31: mod_base = OTHER; note = 2'-O-methylcytidine
  modified_base 32: mod_base = OTHER; note = 2'-O-methyladenosine
  modified_base 33: mod_base = OTHER; note = 2'-O-methylcytidine
  modified_base 34: mod_base = OTHER; note = 2'-O-methyladenosine
  modified_base 35: mod_base = OTHER; note = 2'-O-methylguanosine
  modified_base 36: mod_base = OTHER; note = Arabinoadenosine
  modified_base 39: mod_base = OTHER; note = 2'-O-methyladenosine
  modified_base 40: mod_base = OTHER; note = 2'-O-methylguanosine
  modified_base 41: mod_base = OTHER; note = 2'-O-methyladenosine
  modified_base 42: mod_base = OTHER; note = 2'-O-methyluridine
  modified_base 43: mod_base = OTHER; note = 2'-O-methyladenosine
  modified_base 44: mod_base = OTHER; note = 2'-O-methylguanosine
  modified_base 45: mod_base = OTHER; note = 2'-O-methyladenosine
  modified_base 46: mod_base = OTHER; note = 2'-O-methyladenosine phosphorothioate
  modified_base 47: mod_base = OTHER; note = 2'-O-methylguanosine phosphorothioate
  modified_base 48: mod_base = OTHER; note = 2'-O-methyladenosine phosphorothioate
  modified_base 49: mod_base = OTHER; note = 2'-O-methylcytidine phosphorothioate
  modified_base 50: mod_base = OTHER; note = 2'-O-methyluridine
  misc_feature 1..36: note = RNA
  misc_feature 37..38: note = DNA
  misc_feature 39..50: note = RNA

SEQ ID NO: 108 - DNA, 50 bp, synthetic construct; identical to SEQ ID NO: 87
  source 1..50: mol_type = other DNA; note = Description of Artificial Sequence: Synthetic oligonucleotide; note = Description of Combined DNA/RNA Molecule: Synthetic oligonucleotide
  modified_base 1: mod_base = OTHER; note = 2'-O-methylguanosine phosphorothioate
  modified_base 2: mod_base = OTHER; note = 2'-O-methylcytidine phosphorothioate
  modified_base 3: mod_base = OTHER; note = 2'-O-methylguanosine phosphorothioate
  modified_base 4: mod_base = OTHER; note = 2'-O-methylcytidine phosphorothioate
  modified_base 5: mod_base = OTHER; note = 2'-O-methyluridine
  modified_base 6: mod_base = OTHER; note = 2'-O-methyluridine
  modified_base 7: mod_base = OTHER; note = 2'-O-methylcytidine
  modified_base 8: mod_base = OTHER; note = 2'-O-methyluridine
  modified_base 9: mod_base = OTHER; note = 2'-O-methyluridine
  modified_base 10: mod_base = OTHER; note = 2'-O-methylguanosine
  modified_base 11: mod_base = OTHER; note = 2'-O-methyladenosine
  modified_base 12: mod_base = OTHER; note = 2'-O-methyluridine
  modified_base 13: mod_base = OTHER; note = 2'-O-methylguanosine
  modified_base 14: mod_base = OTHER; note = 2'-O-methylguanosine
  modified_base 15: mod_base = OTHER; note = 2'-O-methylguanosine
  modified_base 16: mod_base = OTHER; note = 2'-O-methylguanosine
  modified_base 17: mod_base = OTHER; note = 2'-O-methyladenosine
  modified_base 18: mod_base = OTHER; note = 2'-O-methylguanosine
  modified_base 19: mod_base = OTHER; note = 2'-O-methyluridine
  modified_base 20: mod_base = OTHER; note = 2'-O-methyladenosine
  modified_base 21: mod_base = OTHER; note = 2'-O-methylcytidine
  modified_base 22: mod_base = OTHER; note = 2'-O-methylguanosine
  modified_base 23: mod_base = OTHER; note = 2'-O-methylguanosine
  modified_base 24: mod_base = OTHER; note = 2'-O-methyluridine
  modified_base 25: mod_base = OTHER; note = 2'-O-methylcytidine
  modified_base 26: mod_base = OTHER; note = 2'-O-methyluridine
  modified_base 27: mod_base = OTHER; note = 2'-O-methylcytidine
  modified_base 28: mod_base = OTHER; note = 2'-O-methylcytidine
  modified_base 29: mod_base = OTHER; note = 2'-O-methyluridine
  modified_base 30: mod_base = OTHER; note = 2'-O-methylguanosine
  modified_base 31: mod_base = OTHER; note = 2'-O-methylcytidine
  modified_base 32: mod_base = OTHER; note = 2'-O-methyladenosine
  modified_base 33: mod_base = OTHER; note = 2'-O-methylcytidine
  modified_base 34: mod_base = OTHER; note = 2'-O-methyladenosine
  modified_base 35: mod_base = OTHER; note = 2'-O-methylguanosine
  modified_base 37: mod_base = OTHER; note = Arabinocytidine
  modified_base 39: mod_base = OTHER; note = 2'-O-methyladenosine
  modified_base 40: mod_base = OTHER; note = 2'-O-methylguanosine
  modified_base 41: mod_base = OTHER; note = 2'-O-methyladenosine
  modified_base 42: mod_base = OTHER; note = 2'-O-methyluridine
  modified_base 43: mod_base = OTHER; note = 2'-O-methyladenosine
  modified_base 44: mod_base = OTHER; note = 2'-O-methylguanosine
  modified_base 45: mod_base = OTHER; note = 2'-O-methyladenosine
  modified_base 46: mod_base = OTHER; note = 2'-O-methyladenosine phosphorothioate
  modified_base 47: mod_base = OTHER; note = 2'-O-methylguanosine phosphorothioate
  modified_base 48: mod_base = OTHER; note = 2'-O-methyladenosine phosphorothioate
  modified_base 49: mod_base = OTHER; note = 2'-O-methylcytidine phosphorothioate
  modified_base 50: mod_base = OTHER; note = 2'-O-methyluridine
  misc_feature 1..35: note = RNA
  misc_feature 36: note = DNA
  misc_feature 37: note = RNA
  misc_feature 38: note = DNA
  misc_feature 39..50: note = RNA

SEQ ID NO: 109 - DNA, 50 bp, synthetic construct; identical to SEQ ID NO: 87
  source 1..50: mol_type = other DNA; note = Description of Artificial Sequence: Synthetic oligonucleotide; note = Description of Combined DNA/RNA Molecule: Synthetic oligonucleotide
  modified_base 1: mod_base = OTHER; note = 2'-O-methylguanosine phosphorothioate
  modified_base 2: mod_base = OTHER; note = 2'-O-methylcytidine phosphorothioate
  modified_base 3: mod_base = OTHER; note = 2'-O-methylguanosine phosphorothioate
  modified_base 4: mod_base = OTHER; note = 2'-O-methylcytidine phosphorothioate
  modified_base 5: mod_base = OTHER; note = 2'-O-methyluridine
  modified_base 6: mod_base = OTHER; note = 2'-O-methyluridine
  modified_base 7: mod_base = OTHER; note = 2'-O-methylcytidine
  modified_base 8: mod_base = OTHER; note = 2'-O-methyluridine
  modified_base 9: mod_base = OTHER; note = 2'-O-methyluridine
  modified_base 10: mod_base = OTHER; note = 2'-O-methylguanosine
  modified_base 11: mod_base = OTHER; note = 2'-O-methyladenosine
  modified_base 12: mod_base = OTHER; note = 2'-O-methyluridine
  modified_base 13: mod_base = OTHER; note = 2'-O-methylguanosine
  modified_base 14: mod_base = OTHER; note = 2'-O-methylguanosine
  modified_base 15: mod_base = OTHER; note = 2'-O-methylguanosine
  modified_base 16: mod_base = OTHER; note = 2'-O-methylguanosine
  modified_base 17: mod_base = OTHER; note = 2'-O-methyladenosine
  modified_base 18: mod_base = OTHER; note = 2'-O-methylguanosine
  modified_base 19: mod_base = OTHER; note = 2'-O-methyluridine
  modified_base 20: mod_base = OTHER; note = 2'-O-methyladenosine
  modified_base 21: mod_base = OTHER; note = 2'-O-methylcytidine
  modified_base 22: mod_base = OTHER; note = 2'-O-methylguanosine
  modified_base 23: mod_base = OTHER; note = 2'-O-methylguanosine
  modified_base 24: mod_base = OTHER; note = 2'-O-methyluridine
  modified_base 25: mod_base = OTHER; note = 2'-O-methylcytidine
  modified_base 26: mod_base = OTHER; note = 2'-O-methyluridine
  modified_base 27: mod_base = OTHER; note = 2'-O-methylcytidine
  modified_base 28: mod_base = OTHER; note = 2'-O-methylcytidine
  modified_base 29: mod_base = OTHER; note = 2'-O-methyluridine
  modified_base 30: mod_base = OTHER; note = 2'-O-methylguanosine
  modified_base 31: mod_base = OTHER; note = 2'-O-methylcytidine
  modified_base 32: mod_base = OTHER; note = 2'-O-methyladenosine
  modified_base 33: mod_base = OTHER; note = 2'-O-methylcytidine
  modified_base 34: mod_base = OTHER; note = 2'-O-methyladenosine
  modified_base 35: mod_base = OTHER; note = 2'-O-methylguanosine
  modified_base 38: mod_base = OTHER; note = Arabinocytidine
  modified_base 39: mod_base = OTHER; note = 2'-O-methyladenosine
  modified_base 40: mod_base = OTHER; note = 2'-O-methylguanosine
  modified_base 41: mod_base = OTHER; note = 2'-O-methyladenosine
  modified_base 42: mod_base = OTHER; note = 2'-O-methyluridine
  modified_base 43: mod_base = OTHER; note = 2'-O-methyladenosine
  modified_base 44: mod_base = OTHER; note = 2'-O-methylguanosine
  modified_base 45: mod_base = OTHER; note = 2'-O-methyladenosine
  modified_base 46: mod_base = OTHER; note = 2'-O-methyladenosine phosphorothioate
  modified_base 47: mod_base = OTHER; note = 2'-O-methylguanosine phosphorothioate
  modified_base 48: mod_base = OTHER; note = 2'-O-methyladenosine phosphorothioate
  modified_base 49: mod_base = OTHER; note = 2'-O-methylcytidine phosphorothioate
  modified_base 50: mod_base = OTHER; note = 2'-O-methyluridine
  misc_feature 1..35: note = RNA
  misc_feature 36..37: note = DNA
  misc_feature 38..50: note = RNA

SEQ ID NO: 110 - RNA, 50 nt, synthetic construct; identical to SEQ ID NO: 106
  source 1..50: mol_type = other RNA; note = Description of Artificial Sequence: Synthetic oligonucleotide
  modified_base 1: mod_base = OTHER; note = 2'-O-methylguanosine phosphorothioate
  modified_base 2: mod_base = OTHER; note = 2'-O-methylcytidine phosphorothioate
  modified_base 3: mod_base = OTHER; note = 2'-O-methylguanosine phosphorothioate
  modified_base 4: mod_base = OTHER; note = 2'-O-methylcytidine phosphorothioate
  modified_base 5: mod_base = OTHER; note = 2'-O-methyluridine
  modified_base 6: mod_base = OTHER; note = 2'-O-methyluridine
  modified_base 7: mod_base = OTHER; note = 2'-O-methylcytidine
  modified_base 8: mod_base = OTHER; note = 2'-O-methyluridine
  modified_base 9: mod_base = OTHER; note = 2'-O-methyluridine
  modified_base 10: mod_base = OTHER; note = 2'-O-methylguanosine
  modified_base 11: mod_base = OTHER; note = 2'-O-methyladenosine
  modified_base 12: mod_base = OTHER; note = 2'-O-methyluridine
  modified_base 13: mod_base = OTHER; note = 2'-O-methylguanosine
  modified_base 14: mod_base = OTHER; note = 2'-O-methylguanosine
  modified_base 15: mod_base = OTHER; note = 2'-O-methylguanosine
  modified_base 16: mod_base = OTHER; note = 2'-O-methylguanosine
  modified_base 17: mod_base = OTHER; note = 2'-O-methyladenosine
  modified_base 18: mod_base = OTHER; note = 2'-O-methylguanosine
  modified_base 19: mod_base = OTHER; note = 2'-O-methyluridine
  modified_base 20: mod_base = OTHER; note = 2'-O-methyladenosine
  modified_base 21: mod_base = OTHER; note = 2'-O-methylcytidine
  modified_base 22: mod_base = OTHER; note = 2'-O-methylguanosine
  modified_base 23: mod_base = OTHER; note = 2'-O-methylguanosine
  modified_base 24: mod_base = OTHER; note = 2'-O-methyluridine
  modified_base 25: mod_base = OTHER; note = 2'-O-methylcytidine
  modified_base 26: mod_base = OTHER; note = 2'-O-methyluridine
  modified_base 27: mod_base = OTHER; note = 2'-O-methylcytidine
  modified_base 28: mod_base = OTHER; note = 2'-O-methylcytidine
  modified_base 29: mod_base = OTHER; note = 2'-O-methyluridine
  modified_base 30: mod_base = OTHER; note = 2'-O-methylguanosine
  modified_base 31: mod_base = OTHER; note = 2'-O-methylcytidine
  modified_base 32: mod_base = OTHER; note = 2'-O-methyladenosine
  modified_base 33: mod_base = OTHER; note = 2'-O-methylcytidine
  modified_base 34: mod_base = OTHER; note = 2'-O-methyladenosine
  modified_base 35: mod_base = OTHER; note = 2'-O-methylguanosine
  modified_base 36: mod_base = OTHER; note = Arabinoadenosine
  modified_base 37: mod_base = OTHER; note = Arabinocytidine
  modified_base 38: mod_base = OTHER; note = Arabinocytidine
  modified_base 39: mod_base = OTHER; note = 2'-O-methyladenosine
  modified_base 40: mod_base = OTHER; note = 2'-O-methylguanosine
  modified_base 41: mod_base = OTHER; note = 2'-O-methyladenosine
  modified_base 42: mod_base = OTHER; note = 2'-O-methyluridine
  modified_base 43: mod_base = OTHER; note = 2'-O-methyladenosine
  modified_base 44: mod_base = OTHER; note = 2'-O-methylguanosine
  modified_base 45: mod_base = OTHER; note = 2'-O-methyladenosine
  modified_base 46: mod_base = OTHER; note = 2'-O-methyladenosine phosphorothioate
  modified_base 47: mod_base = OTHER; note = 2'-O-methylguanosine phosphorothioate
  modified_base 48: mod_base = OTHER; note = 2'-O-methyladenosine phosphorothioate
  modified_base 49: mod_base = OTHER; note = 2'-O-methylcytidine phosphorothioate
  modified_base 50: mod_base = OTHER; note = 2'-O-methyluridine

SEQ ID NO: 111 - DNA, 50 bp, synthetic construct; identical to SEQ ID NO: 87
  source 1..50: mol_type = other DNA; note = Description of Artificial Sequence: Synthetic oligonucleotide; note = Description of Combined DNA/RNA Molecule: Synthetic oligonucleotide
  modified_base 1: mod_base = OTHER; note = 2'-O-methylguanosine phosphorothioate
  modified_base 2: mod_base = OTHER; note = 2'-O-methylcytidine phosphorothioate
  modified_base 3: mod_base = OTHER; note = 2'-O-methylguanosine phosphorothioate
  modified_base 4: mod_base = OTHER; note = 2'-O-methylcytidine phosphorothioate
  modified_base 5: mod_base = OTHER; note = 2'-O-methyluridine
  modified_base 6: mod_base = OTHER; note = 2'-O-methyluridine
  modified_base 7: mod_base = OTHER; note = 2'-O-methylcytidine
  modified_base 8: mod_base = OTHER; note = 2'-O-methyluridine
  modified_base 9: mod_base = OTHER; note = 2'-O-methyluridine
  modified_base 10: mod_base = OTHER; note = 2'-O-methylguanosine
  modified_base 11: mod_base = OTHER; note = 2'-O-methyladenosine
  modified_base 12: mod_base = OTHER; note = 2'-O-methyluridine
  modified_base 13: mod_base = OTHER; note = 2'-O-methylguanosine
  modified_base 14: mod_base = OTHER; note = 2'-O-methylguanosine
  modified_base 15: mod_base = OTHER; note = 2'-O-methylguanosine
  modified_base 16: mod_base = OTHER; note = 2'-O-methylguanosine
  modified_base 17: mod_base = OTHER; note = 2'-O-methyladenosine
  modified_base 18: mod_base = OTHER; note = 2'-O-methylguanosine
  modified_base 19: mod_base = OTHER; note = 2'-O-methyluridine
  modified_base 20: mod_base = OTHER; note = 2'-O-methyladenosine
  modified_base 21: mod_base = OTHER; note = 2'-O-methylcytidine
  modified_base 22: mod_base = OTHER; note = 2'-O-methylguanosine
  modified_base 23: mod_base = OTHER; note = 2'-O-methylguanosine
  modified_base 24: mod_base = OTHER; note = 2'-O-methyluridine
  modified_base 25: mod_base = OTHER; note = 2'-O-methylcytidine
  modified_base 26: mod_base = OTHER; note = 2'-O-methyluridine
  modified_base 27: mod_base = OTHER; note = 2'-O-methylcytidine
  modified_base 28: mod_base = OTHER; note = 2'-O-methylcytidine
  modified_base 29: mod_base = OTHER; note = 2'-O-methyluridine
  modified_base 30: mod_base = OTHER; note = 2'-O-methylguanosine
  modified_base 31: mod_base = OTHER; note = 2'-O-methylcytidine
  modified_base 32: mod_base = OTHER; note = 2'-O-methyladenosine
  modified_base 33: mod_base = OTHER; note = 2'-O-methylcytidine
  modified_base 34: mod_base = OTHER; note = 2'-O-methyladenosine
  modified_base 35: mod_base = OTHER; note = 2'-O-methylguanosine
  modified_base 36: mod_base = OTHER; note = 2'-OMe-arabinoadenosine
  modified_base 39: mod_base = OTHER; note = 2'-O-methyladenosine
  modified_base 40: mod_base = OTHER; note = 2'-O-methylguanosine
  modified_base 41: mod_base = OTHER; note = 2'-O-methyladenosine
  modified_base 42: mod_base = OTHER; note = 2'-O-methyluridine
  modified_base 43: mod_base = OTHER; note = 2'-O-methyladenosine
  modified_base 44: mod_base = OTHER; note = 2'-O-methylguanosine
  modified_base 45: mod_base = OTHER; note = 2'-O-methyladenosine
  modified_base 46: mod_base = OTHER; note = 2'-O-methyladenosine phosphorothioate
  modified_base 47: mod_base = OTHER; note = 2'-O-methylguanosine phosphorothioate
  modified_base 48: mod_base = OTHER; note = 2'-O-methyladenosine phosphorothioate
  modified_base 49: mod_base = OTHER; note = 2'-O-methylcytidine phosphorothioate
  modified_base 50: mod_base = OTHER; note = 2'-O-methyluridine
  misc_feature 1..36: note = RNA
  misc_feature 37..38: note = DNA
  misc_feature 39..50: note = RNA

SEQ ID NO: 112 - DNA, 50 bp, synthetic construct; identical to SEQ ID NO: 87
  source 1..50: mol_type = other DNA; note = Description of Artificial Sequence: Synthetic oligonucleotide; note = Description of Combined DNA/RNA Molecule: Synthetic oligonucleotide
  modified_base 1: mod_base = OTHER; note = 2'-O-methylguanosine phosphorothioate
  modified_base 2: mod_base = OTHER; note = 2'-O-methylcytidine phosphorothioate
  modified_base 3: mod_base = OTHER; note = 2'-O-methylguanosine phosphorothioate
  modified_base 4: mod_base = OTHER; note = 2'-O-methylcytidine phosphorothioate
  modified_base 5: mod_base = OTHER; note = 2'-O-methyluridine
  modified_base 6: mod_base = OTHER; note = 2'-O-methyluridine
  modified_base 7: mod_base = OTHER; note = 2'-O-methylcytidine
  modified_base 8: mod_base = OTHER; note = 2'-O-methyluridine
  modified_base 9: mod_base = OTHER; note = 2'-O-methyluridine
  modified_base 10: mod_base = OTHER; note = 2'-O-methylguanosine
  modified_base 11: mod_base = OTHER; note = 2'-O-methyladenosine
  modified_base 12: mod_base = OTHER; note = 2'-O-methyluridine
  modified_base 13: mod_base = OTHER; note = 2'-O-methylguanosine
  modified_base 14: mod_base = OTHER; note = 2'-O-methylguanosine
  modified_base 15: mod_base = OTHER; note = 2'-O-methylguanosine
  modified_base 16: mod_base = OTHER; note = 2'-O-methylguanosine
  modified_base 17: mod_base = OTHER; note = 2'-O-methyladenosine
  modified_base 18: mod_base = OTHER; note = 2'-O-methylguanosine
  modified_base 19: mod_base = OTHER; note = 2'-O-methyluridine
  modified_base 20: mod_base = OTHER; note = 2'-O-methyladenosine
  modified_base 21: mod_base = OTHER; note = 2'-O-methylcytidine
  modified_base 22: mod_base = OTHER; note = 2'-O-methylguanosine
  modified_base 23: mod_base = OTHER; note = 2'-O-methylguanosine
  modified_base 24: mod_base = OTHER; note = 2'-O-methyluridine
  modified_base 25: mod_base = OTHER; note = 2'-O-methylcytidine
  modified_base 26: mod_base = OTHER; note = 2'-O-methyluridine
  modified_base 27: mod_base = OTHER; note = 2'-O-methylcytidine
  modified_base 28: mod_base = OTHER; note = 2'-O-methylcytidine
  modified_base 29: mod_base = OTHER; note = 2'-O-methyluridine
  modified_base 30: mod_base = OTHER; note = 2'-O-methylguanosine
  modified_base 31: mod_base = OTHER; note = 2'-O-methylcytidine
  modified_base 32: mod_base = OTHER; note = 2'-O-methyladenosine
  modified_base 33: mod_base = OTHER; note = 2'-O-methylcytidine
  modified_base 34: mod_base = OTHER; note = 2'-O-methyladenosine
  modified_base 35: mod_base = OTHER; note = 2'-O-methylguanosine
  modified_base 37: mod_base = OTHER; note = 2'-OMe-arabinocytidine
  modified_base 39: mod_base = OTHER; note = 2'-O-methyladenosine
  modified_base 40: mod_base = OTHER; note = 2'-O-methylguanosine
  modified_base 41: mod_base = OTHER; note = 2'-O-methyladenosine
  modified_base 42: mod_base = OTHER; note = 2'-O-methyluridine
  modified_base 43: mod_base = OTHER; note = 2'-O-methyladenosine
  modified_base 44: mod_base = OTHER; note = 2'-O-methylguanosine
  modified_base 45: mod_base = OTHER; note = 2'-O-methyladenosine
  modified_base 46: mod_base = OTHER; note = 2'-O-methyladenosine phosphorothioate
  modified_base 47: mod_base = OTHER; note = 2'-O-methylguanosine phosphorothioate
  modified_base 48: mod_base = OTHER; note = 2'-O-methyladenosine phosphorothioate
  modified_base 49: mod_base = OTHER; note = 2'-O-methylcytidine phosphorothioate
  modified_base 50: mod_base = OTHER; note = 2'-O-methyluridine
  misc_feature 1..35: note = RNA
  misc_feature 36: note = DNA
  misc_feature 37: note = RNA
  misc_feature 38: note = DNA
  misc_feature 39..50: note = RNA

SEQ ID NO: 113 - DNA, 50 bp, synthetic construct; identical to SEQ ID NO: 87
  source 1..50: mol_type = other DNA; note = Description of Artificial Sequence: Synthetic oligonucleotide; note = Description of Combined DNA/RNA Molecule: Synthetic oligonucleotide
  modified_base 1: mod_base = OTHER; note = 2'-O-methylguanosine phosphorothioate
  modified_base 2: mod_base = OTHER; note = 2'-O-methylcytidine phosphorothioate
  modified_base 3: mod_base = OTHER; note = 2'-O-methylguanosine phosphorothioate
  modified_base 4: mod_base = OTHER; note = 2'-O-methylcytidine phosphorothioate
  modified_base 5: mod_base = OTHER; note = 2'-O-methyluridine
  modified_base 6: mod_base = OTHER; note = 2'-O-methyluridine
  modified_base 7: mod_base = OTHER; note = 2'-O-methylcytidine
  modified_base 8: mod_base = OTHER; note = 2'-O-methyluridine
  modified_base 9: mod_base = OTHER; note = 2'-O-methyluridine
  modified_base 10: mod_base = OTHER; note = 2'-O-methylguanosine
  modified_base 11: mod_base = OTHER; note = 2'-O-methyladenosine
  modified_base 12: mod_base = OTHER; note = 2'-O-methyluridine
  modified_base 13: mod_base = OTHER; note = 2'-O-methylguanosine
  modified_base 14: mod_base = OTHER; note = 2'-O-methylguanosine
  modified_base 15: mod_base = OTHER; note = 2'-O-methylguanosine
  modified_base 16: mod_base = OTHER; note = 2'-O-methylguanosine
  modified_base 17: mod_base = OTHER; note = 2'-O-methyladenosine
  modified_base 18: mod_base = OTHER; note = 2'-O-methylguanosine
  modified_base 19: mod_base = OTHER; note = 2'-O-methyluridine
  modified_base 20: mod_base = OTHER; note = 2'-O-methyladenosine
  modified_base 21: mod_base = OTHER; note = 2'-O-methylcytidine
  modified_base 22: mod_base = OTHER; note = 2'-O-methylguanosine
  modified_base 23: mod_base = OTHER; note = 2'-O-methylguanosine
  modified_base 24: mod_base = OTHER; note = 2'-O-methyluridine
  modified_base 25: mod_base = OTHER; note = 2'-O-methylcytidine
  modified_base 26: mod_base = OTHER; note = 2'-O-methyluridine
  modified_base 27: mod_base = OTHER; note = 2'-O-methylcytidine
  modified_base 28: mod_base = OTHER; note = 2'-O-methylcytidine
  modified_base 29: mod_base = OTHER; note = 2'-O-methyluridine
  modified_base 30: mod_base = OTHER; note = 2'-O-methylguanosine
  modified_base 31: mod_base = OTHER; note = 2'-O-methylcytidine
  modified_base 32: mod_base = OTHER; note = 2'-O-methyladenosine
  modified_base 33: mod_base = OTHER; note = 2'-O-methylcytidine
  modified_base 34: mod_base = OTHER; note = 2'-O-methyladenosine
  modified_base 35: mod_base = OTHER; note = 2'-O-methylguanosine
  modified_base 38: mod_base = OTHER; note = 2'-OMe-arabinocytidine
  modified_base 39: mod_base = OTHER; note = 2'-O-methyladenosine
  modified_base 40: mod_base = OTHER; note = 2'-O-methylguanosine
  modified_base 41: mod_base = OTHER; note = 2'-O-methyladenosine
  modified_base 42: mod_base = OTHER; note = 2'-O-methyluridine
  modified_base 43: mod_base = OTHER; note = 2'-O-methyladenosine
  modified_base 44: mod_base = OTHER; note = 2'-O-methylguanosine
  modified_base 45: mod_base = OTHER; note = 2'-O-methyladenosine
  modified_base 46: mod_base = OTHER; note = 2'-O-methyladenosine phosphorothioate
  modified_base 47: mod_base = OTHER; note = 2'-O-methylguanosine phosphorothioate
  modified_base 48: mod_base = OTHER; note = 2'-O-methyladenosine phosphorothioate
  modified_base 49: mod_base = OTHER; note = 2'-O-methylcytidine phosphorothioate
  modified_base 50: mod_base = OTHER; note = 2'-O-methyluridine
  misc_feature 1..35: note = RNA
  misc_feature 36..37: note = DNA
  misc_feature 38..50: note = RNA

SEQ ID NO: 114 - DNA, 50 bp, synthetic construct; identical to SEQ ID NO: 87
  source 1..50: mol_type = other DNA; note = Description of Artificial Sequence: Synthetic oligonucleotide; note = Description of Combined DNA/RNA Molecule: Synthetic oligonucleotide
  modified_base 1: mod_base = OTHER; note = 2'-O-methylguanosine phosphorothioate
  modified_base 2: mod_base = OTHER; note = 2'-O-methylcytidine phosphorothioate
  modified_base 3: mod_base = OTHER; note = 2'-O-methylguanosine phosphorothioate
  modified_base 4: mod_base = OTHER; note = 2'-O-methylcytidine phosphorothioate
  modified_base 5: mod_base = OTHER; note = 2'-O-methyluridine
  modified_base 6: mod_base = OTHER; note = 2'-O-methyluridine
  modified_base 7: mod_base = OTHER; note = 2'-O-methylcytidine
  modified_base 8: mod_base = OTHER; note = 2'-O-methyluridine
  modified_base 9: mod_base = OTHER; note = 2'-O-methyluridine
  modified_base 10: mod_base = OTHER; note = 2'-O-methylguanosine
  modified_base 11: mod_base = OTHER; note = 2'-O-methyladenosine
  modified_base 12: mod_base = OTHER; note = 2'-O-methyluridine
  modified_base 13: mod_base = OTHER; note = 2'-O-methylguanosine
  modified_base 14: mod_base = OTHER; note = 2'-O-methylguanosine
  modified_base 15: mod_base = OTHER; note = 2'-O-methylguanosine
  modified_base 16: mod_base = OTHER; note = 2'-O-methylguanosine
  modified_base 17: mod_base = OTHER; note = 2'-O-methyladenosine
  modified_base 18: mod_base = OTHER; note = 2'-O-methylguanosine
  modified_base 19: mod_base = OTHER; note = 2'-O-methyluridine
  modified_base 20: mod_base = OTHER; note = 2'-O-methyladenosine
  modified_base 21: mod_base = OTHER; note = 2'-O-methylcytidine
  modified_base 22: mod_base = OTHER; note = 2'-O-methylguanosine
  modified_base 23: mod_base = OTHER; note = 2'-O-methylguanosine
  modified_base 24: mod_base = OTHER; note = 2'-O-methyluridine
  modified_base 25: mod_base = OTHER; note = 2'-O-methylcytidine
  modified_base 26: mod_base = OTHER; note = 2'-O-methyluridine
  modified_base 27: mod_base = OTHER; note = 2'-O-methylcytidine
  modified_base 28: mod_base = OTHER; note = 2'-O-methylcytidine
  modified_base 29: mod_base = OTHER; note = 2'-O-methyluridine
  modified_base 30: mod_base = OTHER; note = 2'-O-methylguanosine
  modified_base 31: mod_base = OTHER; note = 2'-O-methylcytidine
  modified_base 32: mod_base = OTHER; note = 2'-O-methyladenosine
  modified_base 33: mod_base = OTHER; note = 2'-O-methylcytidine
  modified_base 34: mod_base = OTHER; note = 2'-O-methyladenosine
  modified_base 35: mod_base = OTHER; note = 2'-O-methylguanosine
  modified_base 37: mod_base = OTHER; note = Alpha-anomer cytidine
  modified_base 39: mod_base = OTHER; note = 2'-O-methyladenosine
  modified_base 40: mod_base = OTHER; note = 2'-O-methylguanosine
  modified_base 41: mod_base = OTHER; note = 2'-O-methyladenosine
  modified_base 42: mod_base = OTHER; note = 2'-O-methyluridine
  modified_base 43: mod_base = OTHER; note = 2'-O-methyladenosine
  modified_base 44: mod_base = OTHER; note = 2'-O-methylguanosine
  modified_base 45: mod_base = OTHER; note = 2'-O-methyladenosine
  modified_base 46: mod_base = OTHER; note = 2'-O-methyladenosine phosphorothioate
  modified_base 47: mod_base = OTHER; note = 2'-O-methylguanosine phosphorothioate
  modified_base 48: mod_base = OTHER; note = 2'-O-methyladenosine phosphorothioate
  modified_base 49: mod_base = OTHER; note = 2'-O-methylcytidine phosphorothioate
  modified_base 50: mod_base = OTHER; note = 2'-O-methyluridine
  misc_feature 1..35: note = RNA
  misc_feature 36..38: note = DNA
  misc_feature 39..50: note = RNA

SEQ ID NO: 115 - DNA, 50 bp, synthetic construct
  source 1..50: mol_type = other DNA; note = Description of Artificial Sequence: Synthetic oligonucleotide; note = Description of Combined DNA/RNA Molecule: Synthetic oligonucleotide
  modified_base 1: mod_base = OTHER; note = 2'-O-methylguanosine phosphorothioate
  modified_base 2: mod_base = OTHER; note = 2'-O-methylcytidine phosphorothioate
  modified_base 3: mod_base = OTHER; note = 2'-O-methylguanosine phosphorothioate
  modified_base 4: mod_base = OTHER; note = 2'-O-methylcytidine phosphorothioate
  modified_base 5: mod_base = OTHER; note = 2'-O-methyluridine
  modified_base 6: mod_base = OTHER; note = 2'-O-methyluridine
  modified_base 7: mod_base = OTHER; note = 2'-O-methylcytidine
  modified_base 8: mod_base = OTHER; note = 2'-O-methyluridine
  modified_base 9: mod_base = OTHER; note = 2'-O-methyluridine
  modified_base 10: mod_base = OTHER; note = 2'-O-methylguanosine
  modified_base 11: mod_base = OTHER; note = 2'-O-methyladenosine
  modified_base 12: mod_base = OTHER; note = 2'-O-methyluridine
  modified_base 13: mod_base = OTHER; note = 2'-O-methylguanosine
  modified_base 14: mod_base = OTHER; note = 2'-O-methylguanosine
  modified_base 15: mod_base = OTHER; note = 2'-O-methylguanosine
  modified_base 16: mod_base = OTHER; note = 2'-O-methylguanosine
  modified_base 17: mod_base = OTHER; note = 2'-O-methyladenosine
  modified_base 18: mod_base = OTHER; note = 2'-O-methylguanosine
  modified_base 19: mod_base = OTHER; note = 2'-O-methyluridine
  modified_base 20: mod_base = OTHER; note = 2'-O-methyladenosine
  modified_base 21: mod_base = OTHER; note = 2'-O-methylcytidine
  modified_base 22: mod_base = OTHER; note = 2'-O-methylguanosine
  modified_base 23: mod_base = OTHER; note = 2'-O-methylguanosine
  modified_base 24: mod_base = OTHER; note = 2'-O-methyluridine
  modified_base 25: mod_base = OTHER; note = 2'-O-methylcytidine
  modified_base 26: mod_base = OTHER; note = 2'-O-methyluridine
  modified_base 27: mod_base = OTHER; note = 2'-O-methylcytidine
  modified_base 28: mod_base = OTHER; note = 2'-O-methylcytidine
  modified_base 29: mod_base = OTHER; note = 2'-O-methyluridine
  modified_base 30: mod_base = OTHER; note = 2'-O-methylguanosine
  modified_base 31: mod_base = OTHER; note = 2'-O-methylcytidine
  modified_base 32: mod_base = OTHER; note = 2'-O-methyladenosine
  modified_base 33: mod_base = OTHER; note = 2'-O-methylcytidine
  modified_base 34: mod_base = OTHER; note = 2'-O-methyladenosine
  modified_base 35: mod_base = OTHER; note = 2'-O-methylguanosine
  modified_base 37: mod_base = OTHER; note = Abasic nucleotide
  modified_base 39: mod_base = OTHER; note = 2'-O-methyladenosine
  modified_base 40: mod_base = OTHER; note = 2'-O-methylguanosine
  modified_base 41: mod_base = OTHER; note = 2'-O-methyladenosine
  modified_base 42: mod_base = OTHER; note = 2'-O-methyluridine
  modified_base 43: mod_base = OTHER; note = 2'-O-methyladenosine
  modified_base 44: mod_base = OTHER; note = 2'-O-methylguanosine
  modified_base 45: mod_base = OTHER; note = 2'-O-methyladenosine
  modified_base 46: mod_base = OTHER; note = 2'-O-methyladenosine phosphorothioate
  modified_base 47: mod_base = OTHER; note = 2'-O-methylguanosine phosphorothioate
  modified_base 48: mod_base = OTHER; note = 2'-O-methyladenosine phosphorothioate
  modified_base 49: mod_base = OTHER; note = 2'-O-methylcytidine phosphorothioate
  modified_base 50: mod_base = OTHER; note = 2'-O-methyluridine
  misc_feature 1..35: note = RNA
  misc_feature 36..38: note = DNA
  misc_feature 39..50: note = RNA
gcgcttcttgatggggagtacggtctcctgcacagancagatagaagact

SEQ ID NO: 116 - DNA, 50 bp, synthetic construct; identical to SEQ ID NO: 115
  source 1..50: mol_type = other DNA; note = Description of Artificial Sequence: Synthetic oligonucleotide; note = Description of Combined DNA/RNA Molecule: Synthetic oligonucleotide
  modified_base 1: mod_base = OTHER; note = 2'-O-methylguanosine phosphorothioate
  modified_base 2: mod_base = OTHER; note = 2'-O-methylcytidine phosphorothioate
  modified_base 3: mod_base = OTHER; note = 2'-O-methylguanosine phosphorothioate
  modified_base 4: mod_base = OTHER; note = 2'-O-methylcytidine phosphorothioate
  modified_base 5: mod_base = OTHER; note = 2'-O-methyluridine
  modified_base 6: mod_base = OTHER; note = 2'-O-methyluridine
  modified_base 7: mod_base = OTHER; note = 2'-O-methylcytidine
  modified_base 8: mod_base = OTHER; note = 2'-O-methyluridine
  modified_base 9: mod_base = OTHER; note = 2'-O-methyluridine
  modified_base 10: mod_base = OTHER; note = 2'-O-methylguanosine
  modified_base 11: mod_base = OTHER; note = 2'-O-methyladenosine
  modified_base 12: mod_base = OTHER; note = 2'-O-methyluridine
  modified_base 13: mod_base = OTHER; note = 2'-O-methylguanosine
  modified_base 14: mod_base = OTHER; note = 2'-O-methylguanosine
  modified_base 15: mod_base = OTHER; note = 2'-O-methylguanosine
  modified_base 16: mod_base = OTHER; note = 2'-O-methylguanosine
  modified_base 17: mod_base = OTHER; note = 2'-O-methyladenosine
  modified_base 18: mod_base = OTHER; note = 2'-O-methylguanosine
  modified_base 19: mod_base = OTHER; note = 2'-O-methyluridine
  modified_base 20: mod_base = OTHER; note = 2'-O-methyladenosine
  modified_base 21: mod_base = OTHER; note = 2'-O-methylcytidine
  modified_base 22: mod_base = OTHER; note = 2'-O-methylguanosine
  modified_base 23: mod_base = OTHER; note = 2'-O-methylguanosine
  modified_base 24: mod_base = OTHER; note = 2'-O-methyluridine
  modified_base 25: mod_base = OTHER; note = 2'-O-methylcytidine
  modified_base 26: mod_base = OTHER; note = 2'-O-methyluridine
  modified_base 27: mod_base = OTHER; note = 2'-O-methylcytidine
  modified_base 28: mod_base = OTHER; note = 2'-O-methylcytidine
  modified_base 29: mod_base = OTHER; note = 2'-O-methyluridine
  modified_base 30: mod_base = OTHER; note = 2'-O-methylguanosine
  modified_base 31: mod_base = OTHER; note = 2'-O-methylcytidine
  modified_base 32: mod_base = OTHER; note = 2'-O-methyladenosine
  modified_base 33: mod_base = OTHER; note = 2'-O-methylcytidine
  modified_base 34: mod_base = OTHER; note = 2'-O-methyladenosine
  modified_base 35: mod_base = OTHER; note = 2'-O-methylguanosine
  modified_base 37: mod_base = OTHER; note = Abasic nucleotide
  modified_base 39: mod_base = OTHER; note = 2'-O-methyladenosine
  modified_base 40: mod_base = OTHER; note = 2'-O-methylguanosine
  modified_base 41: mod_base = OTHER; note = 2'-O-methyladenosine
  modified_base 42: mod_base = OTHER; note = 2'-O-methyluridine
  modified_base 43: mod_base = OTHER; note = 2'-O-methyladenosine
  modified_base 44: mod_base = OTHER; note = 2'-O-methylguanosine
  modified_base 45: mod_base = OTHER; note = 2'-O-methyladenosine
  modified_base 46: mod_base = OTHER; note = 2'-O-methyladenosine phosphorothioate
  modified_base 47: mod_base = OTHER; note = 2'-O-methylguanosine phosphorothioate
  modified_base 48: mod_base = OTHER; note = 2'-O-methyladenosine phosphorothioate
  modified_base 49: mod_base = OTHER; note = 2'-O-methylcytidine phosphorothioate
  modified_base 50: mod_base = OTHER; note = 2'-O-methyluridine
  misc_feature 1..35: note = RNA
  misc_feature 36: note = DNA
  misc_feature 37: note = RNA
  misc_feature 38: note = DNA
  misc_feature 39..50: note = RNA

SEQ ID NO: 117 - DNA, 50 bp, synthetic construct; identical to SEQ ID NO: 115
  source 1..50: mol_type = other DNA; note = Description of Artificial Sequence: Synthetic oligonucleotide; note = Description of Combined DNA/RNA Molecule: Synthetic oligonucleotide
  modified_base 1: mod_base = OTHER; note = 2'-O-methylguanosine phosphorothioate
  modified_base 2: mod_base = OTHER; note = 2'-O-methylcytidine phosphorothioate
  modified_base 3: mod_base = OTHER; note = 2'-O-methylguanosine phosphorothioate
  modified_base 4: mod_base = OTHER; note = 2'-O-methylcytidine phosphorothioate
  modified_base 5: mod_base = OTHER; note = 2'-O-methyluridine
  modified_base 6: mod_base = OTHER; note = 2'-O-methyluridine
  modified_base 7: mod_base = OTHER; note = 2'-O-methylcytidine
  modified_base 8: mod_base = OTHER; note = 2'-O-methyluridine
  modified_base 9: mod_base = OTHER; note = 2'-O-methyluridine
  modified_base 10: mod_base = OTHER; note = 2'-O-methylguanosine
  modified_base 11: mod_base = OTHER; note = 2'-O-methyladenosine
  modified_base 12: mod_base = OTHER; note = 2'-O-methyluridine
  modified_base 13: mod_base = OTHER; note = 2'-O-methylguanosine
  modified_base 14: mod_base = OTHER; note = 2'-O-methylguanosine
  modified_base 15: mod_base = OTHER; note = 2'-O-methylguanosine
  modified_base 16: mod_base = OTHER; note = 2'-O-methylguanosine
  modified_base 17: mod_base = OTHER; note = 2'-O-methyladenosine
  modified_base 18: mod_base = OTHER; note = 2'-O-methylguanosine
  modified_base 19: mod_base = OTHER; note = 2'-O-methyluridine
  modified_base 20: mod_base = OTHER; note = 2'-O-methyladenosine
  modified_base 21: mod_base = OTHER; note = 2'-O-methylcytidine
  modified_base 22: mod_base = OTHER; note = 2'-O-methylguanosine
  modified_base 23: mod_base = OTHER; note = 2'-O-methylguanosine
  modified_base 24: mod_base = OTHER; note = 2'-O-methyluridine
  modified_base 25: mod_base = OTHER; note = 2'-O-methylcytidine
  modified_base 26: mod_base = OTHER; note = 2'-O-methyluridine
  modified_base 27: mod_base = OTHER; note = 2'-O-methylcytidine
  modified_base 28: mod_base = OTHER; note = 2'-O-methylcytidine
  modified_base 29: mod_base = OTHER; note = 2'-O-methyluridine
  modified_base 30: mod_base = OTHER; note = 2'-O-methylguanosine
  modified_base 31: mod_base = OTHER; note = 2'-O-methylcytidine
  modified_base 32: mod_base = OTHER; note = 2'-O-methyladenosine
  modified_base 33: mod_base = OTHER; note = 2'-O-methylcytidine
  modified_base 34: mod_base = OTHER; note = 2'-O-methyladenosine
  modified_base 35: mod_base = OTHER; note = 2'-O-methylguanosine
  modified_base 37: mod_base = OTHER; note = 2'-OMe-Abasic nucleotide
  modified_base 39: mod_base = OTHER; note = 2'-O-methyladenosine
  modified_base 40: mod_base = OTHER; note = 2'-O-methylguanosine
  modified_base 41: mod_base = OTHER; note = 2'-O-methyladenosine
  modified_base 42: mod_base = OTHER; note = 2'-O-methyluridine
  modified_base 43: mod_base = OTHER; note = 2'-O-methyladenosine
  modified_base 44: mod_base = OTHER; note = 2'-O-methylguanosine
  modified_base 45: mod_base = OTHER; note = 2'-O-methyladenosine
  modified_base 46: mod_base = OTHER; note = 2'-O-methyladenosine phosphorothioate
  modified_base 47: mod_base = OTHER; note = 2'-O-methylguanosine phosphorothioate
  modified_base 48: mod_base = OTHER; note = 2'-O-methyladenosine phosphorothioate
  modified_base 49: mod_base = OTHER; note = 2'-O-methylcytidine phosphorothioate
  modified_base 50: mod_base = OTHER; note = 2'-O-methyluridine
  misc_feature 1..35: note = RNA
  misc_feature 36: note = DNA
  misc_feature 37: note = RNA
  misc_feature 38: note = DNA
  misc_feature 39..50: note = RNA

SEQ ID NO: 118 - DNA, 50 bp, synthetic construct; identical to SEQ ID NO: 87
  source 1..50: mol_type = other DNA; note = Description of Artificial Sequence: Synthetic oligonucleotide; note = Description of Combined DNA/RNA Molecule: Synthetic oligonucleotide
  modified_base 1: mod_base = OTHER; note = 2'-O-methylguanosine phosphorothioate
  modified_base 2: mod_base = OTHER; note = 2'-O-methylcytidine phosphorothioate
  modified_base 3: mod_base = OTHER; note = 2'-O-methylguanosine phosphorothioate
  modified_base 4: mod_base = OTHER; note = 2'-O-methylcytidine phosphorothioate
  modified_base 5: mod_base = OTHER; note = 2'-O-methyluridine
  modified_base 6: mod_base = OTHER; note = 2'-O-methyluridine
  modified_base 7: mod_base = OTHER; note = 2'-O-methylcytidine
  modified_base 8: mod_base = OTHER; note = 2'-O-methyluridine
  modified_base 9: mod_base = OTHER; note = 2'-O-methyluridine
  modified_base 10: mod_base = OTHER; note = 2'-O-methylguanosine
  modified_base 11: mod_base = OTHER; note = 2'-O-methyladenosine
  modified_base 12: mod_base = OTHER; note = 2'-O-methyluridine
  modified_base 13: mod_base = OTHER; note = 2'-O-methylguanosine
  modified_base 14: mod_base = OTHER; note = 2'-O-methylguanosine
  modified_base 15: mod_base = OTHER; note = 2'-O-methylguanosine
  modified_base 16: mod_base = OTHER; note = 2'-O-methylguanosine
  modified_base 17: mod_base = OTHER; note = 2'-O-methyladenosine
  modified_base 18: mod_base = OTHER; note = 2'-O-methylguanosine
  modified_base 19: mod_base = OTHER; note = 2'-O-methyluridine
  modified_base 20: mod_base = OTHER; note = 2'-O-methyladenosine
  modified_base 21: mod_base = OTHER; note = 2'-O-methylcytidine
  modified_base 22: mod_base = OTHER; note = 2'-O-methylguanosine
  modified_base 23: mod_base = OTHER; note = 2'-O-methylguanosine
  modified_base 24: mod_base = OTHER; note = 2'-O-methyluridine
  modified_base 25: mod_base = OTHER; note = 2'-O-methylcytidine
  modified_base 26: mod_base = OTHER; note = 2'-O-methyluridine
  modified_base 27: mod_base = OTHER; note = 2'-O-methylcytidine
  modified_base 28: mod_base = OTHER; note = 2'-O-methylcytidine
  modified_base 29: mod_base = OTHER; note = 2'-O-methyluridine
  modified_base 30: mod_base = OTHER; note = 2'-O-methylguanosine
  modified_base 31: mod_base = OTHER; note = 2'-O-methylcytidine
  modified_base 32: mod_base = OTHER; note = 2'-O-methyladenosine
  modified_base 33: mod_base = OTHER; note = 2'-O-methylcytidine
  modified_base 34: mod_base = OTHER; note = 2'-O-methyladenosine
  modified_base 35: mod_base = OTHER; note = 2'-O-methylguanosine
  modified_base 36: mod_base = OTHER; note = (S)-glycol adenosine
  modified_base 39: mod_base = OTHER; note = 2'-O-methyladenosine
  modified_base 40: mod_base = OTHER; note = 2'-O-methylguanosine
  modified_base 41: mod_base = OTHER; note = 2'-O-methyladenosine
  modified_base 42: mod_base = OTHER; note = 2'-O-methyluridine
  modified_base 43: mod_base = OTHER; note = 2'-O-methyladenosine
  modified_base 44: mod_base = OTHER; note = 2'-O-methylguanosine
  modified_base 45: mod_base = OTHER; note = 2'-O-methyladenosine
  modified_base 46: mod_base = OTHER; note = 2'-O-methyladenosine phosphorothioate
  modified_base 47: mod_base = OTHER; note = 2'-O-methylguanosine phosphorothioate
  modified_base 48: mod_base = OTHER; note = 2'-O-methyladenosine phosphorothioate
  modified_base 49: mod_base = OTHER; note = 2'-O-methylcytidine phosphorothioate
  modified_base 50: mod_base = OTHER; note = 2'-O-methyluridine
  misc_feature 1..36: note = RNA
  misc_feature 37..38: note = DNA
  misc_feature 39..50: note = RNA

SEQ ID NO: 119 - DNA, 50 bp, synthetic construct; identical to SEQ ID NO: 87
  source 1..50: mol_type = other DNA; note = Description of Artificial Sequence: Synthetic oligonucleotide; note = Description of Combined DNA/RNA Molecule: Synthetic oligonucleotide
  modified_base 1: mod_base = OTHER; note = 2'-O-methylguanosine phosphorothioate
  modified_base 2: mod_base = OTHER; note = 2'-O-methylcytidine phosphorothioate
  modified_base 3: mod_base = OTHER; note = 2'-O-methylguanosine phosphorothioate
  modified_base 4: mod_base = OTHER; note = 2'-O-methylcytidine phosphorothioate
  modified_base 5: mod_base = OTHER; note = 2'-O-methyluridine
  modified_base 6: mod_base = OTHER; note = 2'-O-methyluridine
  modified_base 7: mod_base = OTHER; note = 2'-O-methylcytidine
  modified_base 8: mod_base = OTHER; note = 2'-O-methyluridine
  modified_base 9: mod_base = OTHER; note = 2'-O-methyluridine
  modified_base 10: mod_base = OTHER; note = 2'-O-methylguanosine
  modified_base 11: mod_base = OTHER; note = 2'-O-methyladenosine
  modified_base 12: mod_base = OTHER; note = 2'-O-methyluridine
  modified_base 13: mod_base = OTHER; note = 2'-O-methylguanosine
  modified_base 14: mod_base = OTHER; note = 2'-O-methylguanosine
  modified_base 15: mod_base = OTHER; note = 2'-O-methylguanosine
  modified_base 16: mod_base = OTHER; note = 2'-O-methylguanosine
  modified_base 17: mod_base = OTHER; note = 2'-O-methyladenosine
  modified_base 18: mod_base = OTHER; note = 2'-O-methylguanosine
  modified_base 19: mod_base = OTHER; note = 2'-O-methyluridine
  modified_base 20: mod_base = OTHER; note = 2'-O-methyladenosine
  modified_base 21: mod_base = OTHER; note = 2'-O-methylcytidine
  modified_base 22: mod_base = OTHER; note = 2'-O-methylguanosine
  modified_base 23: mod_base = OTHER; note = 2'-O-methylguanosine
  modified_base 24: mod_base = OTHER; note = 2'-O-methyluridine
  modified_base 25: mod_base = OTHER; note = 2'-O-methylcytidine
  modified_base 26: mod_base = OTHER; note = 2'-O-methyluridine
  modified_base 27: mod_base = OTHER; note = 2'-O-methylcytidine
  modified_base 28: mod_base = OTHER; note = 2'-O-methylcytidine
  modified_base 29: mod_base = OTHER; note = 2'-O-methyluridine
  modified_base 30: mod_base = OTHER; note = 2'-O-methylguanosine
  modified_base 31: mod_base = OTHER; note = 2'-O-methylcytidine
  modified_base 32: mod_base = OTHER; note = 2'-O-methyladenosine
  modified_base 33: mod_base = OTHER; note = 2'-O-methylcytidine
  modified_base 34: mod_base = OTHER; note = 2'-O-methyladenosine
  modified_base 35: mod_base = OTHER; note = 2'-O-methylguanosine
  modified_base 37: mod_base = OTHER; note = (S)-glycol cytidine
  modified_base 39: mod_base = OTHER; note = 2'-O-methyladenosine
  modified_base 40: mod_base = OTHER; note = 2'-O-methylguanosine
  modified_base 41: mod_base = OTHER; note = 2'-O-methyladenosine
  modified_base 42: mod_base = OTHER; note = 2'-O-methyluridine
  modified_base 43: mod_base = OTHER; note = 2'-O-methyladenosine
  modified_base 44: mod_base = OTHER; note = 2'-O-methylguanosine
  modified_base 45: mod_base = OTHER; note = 2'-O-methyladenosine
  modified_base 46: mod_base = OTHER; note = 2'-O-methyladenosine phosphorothioate
  modified_base 47: mod_base = OTHER; note = 2'-O-methylguanosine phosphorothioate
  modified_base 48: mod_base = OTHER; note = 2'-O-methyladenosine phosphorothioate
  modified_base 49: mod_base = OTHER; note = 2'-O-methylcytidine phosphorothioate
  modified_base 50: mod_base = OTHER; note = 2'-O-methyluridine
  misc_feature 1..35: note = RNA
  misc_feature 36: note = DNA
  misc_feature 37: note = RNA
  misc_feature 38: note = DNA
  misc_feature 39..50: note = RNA

SEQ ID NO: 120 - DNA, 50 bp, synthetic construct; identical to SEQ ID NO: 87
  source 1..50: mol_type = other DNA; note = Description of Artificial Sequence: Synthetic oligonucleotide; note = Description of Combined DNA/RNA Molecule: Synthetic oligonucleotide
  modified_base 1: mod_base = OTHER; note = 2'-O-methylguanosine phosphorothioate
  modified_base 2: mod_base = OTHER; note = 2'-O-methylcytidine phosphorothioate
  modified_base 3: mod_base = OTHER; note = 2'-O-methylguanosine phosphorothioate
  modified_base 4: mod_base = OTHER; note = 2'-O-methylcytidine phosphorothioate
  modified_base 5: mod_base = OTHER; note = 2'-O-methyluridine
  modified_base 6: mod_base = OTHER; note = 2'-O-methyluridine
  modified_base 7: mod_base = OTHER; note = 2'-O-methylcytidine
  modified_base 8: mod_base = OTHER; note = 2'-O-methyluridine
  modified_base 9: mod_base = OTHER; note = 2'-O-methyluridine
  modified_base 10: mod_base = OTHER; note = 2'-O-methylguanosine
  modified_base 11: mod_base = OTHER; note = 2'-O-methyladenosine
  modified_base 12: mod_base = OTHER; note = 2'-O-methyluridine
  modified_base 13: mod_base = OTHER; note = 2'-O-methylguanosine
  modified_base 14: mod_base = OTHER; note = 2'-O-methylguanosine
  modified_base 15: mod_base = OTHER; note = 2'-O-methylguanosine
  modified_base 16: mod_base = OTHER; note = 2'-O-methylguanosine
  modified_base 17: mod_base = OTHER; note = 2'-O-methyladenosine
  modified_base 18: mod_base = OTHER; note = 2'-O-methylguanosine
  modified_base 19: mod_base = OTHER; note = 2'-O-methyluridine
  modified_base 20: mod_base = OTHER; note = 2'-O-methyladenosine
  modified_base 21: mod_base = OTHER; note = 2'-O-methylcytidine
  modified_base 22: mod_base = OTHER; note = 2'-O-methylguanosine
  modified_base 23: mod_base = OTHER; note = 2'-O-methylguanosine
  modified_base 24: mod_base = OTHER; note = 2'-O-methyluridine
  modified_base 25: mod_base = OTHER; note = 2'-O-methylcytidine
  modified_base 26: mod_base = OTHER; note = 2'-O-methyluridine
  modified_base 27: mod_base = OTHER; note = 2'-O-methylcytidine
  modified_base 28: mod_base = OTHER; note = 2'-O-methylcytidine
  modified_base 29: mod_base = OTHER; note = 2'-O-methyluridine
  modified_base 30: mod_base = OTHER; note = 2'-O-methylguanosine
  modified_base 31: mod_base = OTHER; note = 2'-O-methylcytidine
  modified_base 32: mod_base = OTHER; note = 2'-O-methyladenosine
  modified_base 33: mod_base = OTHER; note = 2'-O-methylcytidine
  modified_base 34: mod_base = OTHER; note = 2'-O-methyladenosine
  modified_base 35: mod_base = OTHER; note = 2'-O-methylguanosine
  modified_base 36: mod_base = OTHER; note = (S)-glycol adenosine
  modified_base 37: mod_base = OTHER; note = (S)-glycol cytidine
  modified_base 39: mod_base = OTHER; note = 2'-O-methyladenosine
  modified_base 40: mod_base = OTHER; note = 2'-O-methylguanosine
  modified_base 41: mod_base = OTHER; note = 2'-O-methyladenosine
  modified_base 42: mod_base = OTHER; note = 2'-O-methyluridine
  modified_base 43: mod_base = OTHER; note = 2'-O-methyladenosine
  modified_base 44: mod_base = OTHER; note = 2'-O-methylguanosine
  modified_base 45: mod_base = OTHER; note = 2'-O-methyladenosine
  modified_base 46: mod_base = OTHER; note = 2'-O-methyladenosine phosphorothioate
  modified_base 47: mod_base = OTHER; note = 2'-O-methylguanosine phosphorothioate
  modified_base 48: mod_base = OTHER; note = 2'-O-methyladenosine phosphorothioate
  modified_base 49: mod_base = OTHER; note = 2'-O-methylcytidine phosphorothioate
  modified_base 50: mod_base = OTHER; note = 2'-O-methyluridine
  misc_feature 1..37: note = RNA
  misc_feature 38: note = DNA
  misc_feature 39..50: note = RNA

SEQ ID NO: 121 - DNA, 50 bp, synthetic construct; identical to SEQ ID NO: 87
  source 1..50: mol_type = other DNA; note = Description of Artificial Sequence: Synthetic oligonucleotide; note = Description of Combined DNA/RNA Molecule: Synthetic oligonucleotide
  modified_base 1: mod_base = OTHER; note = 2'-O-methylguanosine phosphorothioate
  modified_base 2: mod_base = OTHER; note = 2'-O-methylcytidine phosphorothioate
  modified_base 3: mod_base = OTHER; note = 2'-O-methylguanosine phosphorothioate
  modified_base 4: mod_base = OTHER; note = 2'-O-methylcytidine phosphorothioate
  modified_base 5: mod_base = OTHER; note = 2'-O-methyluridine
  modified_base 6: mod_base = OTHER; note = 2'-O-methyluridine
  modified_base 7: mod_base = OTHER; note = 2'-O-methylcytidine
  modified_base 8: mod_base = OTHER; note = 2'-O-methyluridine
  modified_base 9: mod_base = OTHER; note = 2'-O-methyluridine
  modified_base 10: mod_base = OTHER; note = 2'-O-methylguanosine
  modified_base 11: mod_base = OTHER; note = 2'-O-methyladenosine
  modified_base 12: mod_base = OTHER; note = 2'-O-methyluridine
  modified_base 13: mod_base = OTHER; note = 2'-O-methylguanosine
  modified_base 14: mod_base = OTHER; note = 2'-O-methylguanosine
  modified_base 15: mod_base = OTHER; note = 2'-O-methylguanosine
  modified_base 16: mod_base = OTHER; note = 2'-O-methylguanosine
  modified_base 17: mod_base = OTHER; note = 2'-O-methyladenosine
  modified_base 18: mod_base = OTHER; note = 2'-O-methylguanosine
  modified_base 19: mod_base = OTHER; note = 2'-O-methyluridine
  modified_base 20: mod_base = OTHER; note = 2'-O-methyladenosine
  modified_base 21: mod_base = OTHER; note = 2'-O-methylcytidine
  modified_base 22: mod_base = OTHER; note = 2'-O-methylguanosine
  modified_base 23: mod_base = OTHER; note = 2'-O-methylguanosine
  modified_base 24: mod_base = OTHER; note = 2'-O-methyluridine
  modified_base 25: mod_base = OTHER; note = 2'-O-methylcytidine
  modified_base 26: mod_base = OTHER; note = 2'-O-methyluridine
  modified_base 27: mod_base = OTHER; note = 2'-O-methylcytidine
  modified_base 28: mod_base = OTHER; note = 2'-O-methylcytidine
  modified_base 29: mod_base = OTHER; note = 2'-O-methyluridine
  modified_base 30: mod_base = OTHER; note = 2'-O-methylguanosine
  modified_base 31: mod_base = OTHER; note = 2'-O-methylcytidine
  modified_base 32: mod_base = OTHER; note = 2'-O-methyladenosine
  modified_base 33: mod_base = OTHER; note = 2'-O-methylcytidine
  modified_base 34: mod_base = OTHER; note = 2'-O-methyladenosine
  modified_base 35: mod_base = OTHER; note = 2'-O-methylguanosine
  modified_base 36: mod_base = OTHER; note = (R)-glycol adenosine
  modified_base 39: mod_base = OTHER; note = 2'-O-methyladenosine
  modified_base 40: mod_base = OTHER; note = 2'-O-methylguanosine
  modified_base 41: mod_base = OTHER; note = 2'-O-methyladenosine
  modified_base 42: mod_base = OTHER; note = 2'-O-methyluridine
  modified_base 43: mod_base = OTHER; note = 2'-O-methyladenosine
  modified_base 44: mod_base = OTHER; note = 2'-O-methylguanosine
  modified_base 45: mod_base = OTHER; note = 2'-O-methyladenosine
  modified_base 46: mod_base = OTHER; note = 2'-O-methyladenosine phosphorothioate
  modified_base 47: mod_base = OTHER; note = 2'-O-methylguanosine phosphorothioate
  modified_base 48: mod_base = OTHER; note = 2'-O-methyladenosine phosphorothioate
  modified_base 49: mod_base = OTHER; note = 2'-O-methylcytidine phosphorothioate
  modified_base 50: mod_base = OTHER; note = 2'-O-methyluridine
  misc_feature 1..36: note = RNA
  misc_feature 37..38: note = DNA
  misc_feature 39..50: note = RNA

SEQ ID NO: 122 - DNA, 50 bp, synthetic construct; identical to SEQ ID NO: 87
  source 1..50: mol_type = other DNA; note = Description of Artificial Sequence: Synthetic oligonucleotide; note = Description of Combined DNA/RNA Molecule: Synthetic oligonucleotide
  modified_base 1: mod_base = OTHER; note = 2'-O-methylguanosine phosphorothioate
  modified_base 2: mod_base = OTHER; note = 2'-O-methylcytidine phosphorothioate
  modified_base 3: mod_base = OTHER; note = 2'-O-methylguanosine phosphorothioate
  modified_base 4: mod_base = OTHER; note = 2'-O-methylcytidine phosphorothioate
  modified_base 5: mod_base = OTHER; note = 2'-O-methyluridine
  modified_base 6: mod_base = OTHER; note = 2'-O-methyluridine
  modified_base 7: mod_base = OTHER; note = 2'-O-methylcytidine
  modified_base 8: mod_base = OTHER; note = 2'-O-methyluridine
  modified_base 9: mod_base = OTHER; note = 2'-O-methyluridine
  modified_base 10: mod_base = OTHER; note = 2'-O-methylguanosine
  modified_base 11: mod_base = OTHER; note = 2'-O-methyladenosine
  modified_base 12: mod_base = OTHER; note = 2'-O-methyluridine
  modified_base 13: mod_base = OTHER; note = 2'-O-methylguanosine
  modified_base 14: mod_base = OTHER; note = 2'-O-methylguanosine
  modified_base 15: mod_base = OTHER; note = 2'-O-methylguanosine
  modified_base 16: mod_base = OTHER; note = 2'-O-methylguanosine
  modified_base 17: mod_base = OTHER; note = 2'-O-methyladenosine
  modified_base 18: mod_base = OTHER; note = 2'-O-methylguanosine
  modified_base 19: mod_base = OTHER; note = 2'-O-methyluridine
  modified_base 20: mod_base = OTHER; note = 2'-O-methyladenosine
  modified_base 21: mod_base = OTHER; note = 2'-O-methylcytidine
  modified_base 22: mod_base = OTHER; note = 2'-O-methylguanosine
  modified_base 23: mod_base = OTHER; note = 2'-O-methylguanosine
  modified_base 24: mod_base = OTHER; note = 2'-O-methyluridine
  modified_base 25: mod_base = OTHER; note = 2'-O-methylcytidine
  modified_base 26: mod_base = OTHER; note = 2'-O-methyluridine
  modified_base 27: mod_base = OTHER; note = 2'-O-methylcytidine
  modified_base 28: mod_base = OTHER; note = 2'-O-methylcytidine
  modified_base 29: mod_base = OTHER; note = 2'-O-methyluridine
  modified_base 30: mod_base = OTHER; note = 2'-O-methylguanosine
  modified_base 31: mod_base = OTHER; note = 2'-O-methylcytidine
  modified_base 32: mod_base = OTHER; note = 2'-O-methyladenosine
  modified_base 33: mod_base = OTHER; note = 2'-O-methylcytidine
  modified_base 34: mod_base = OTHER; note = 2'-O-methyladenosine
  modified_base 35: mod_base = OTHER; note = 2'-O-methylguanosine
  modified_base 37: mod_base = OTHER; note = (R)-glycol cytidine
  modified_base 39: mod_base = OTHER; note = 2'-O-methyladenosine
  modified_base 40: mod_base = OTHER; note = 2'-O-methylguanosine
  modified_base 41: mod_base = OTHER; note = 2'-O-methyladenosine
  modified_base 42: mod_base = OTHER; note = 2'-O-methyluridine
  modified_base 43: mod_base = OTHER; note = 2'-O-methyladenosine
  modified_base 44: mod_base = OTHER; note = 2'-O-methylguanosine
  modified_base 45: mod_base = OTHER; note = 2'-O-methyladenosine
  modified_base 46: mod_base = OTHER; note = 2'-O-methyladenosine phosphorothioate
  modified_base 47: mod_base = OTHER; note = 2'-O-methylguanosine phosphorothioate
  modified_base 48: mod_base = OTHER; note = 2'-O-methyladenosine phosphorothioate
  modified_base 49: mod_base = OTHER; note = 2'-O-methylcytidine phosphorothioate
  modified_base 50: mod_base = OTHER; note = 2'-O-methyluridine
  misc_feature 1..35: note = RNA
  misc_feature 36: note = DNA
  misc_feature 37: note = RNA
  misc_feature 38: note = DNA
  misc_feature 39..50: note = RNA

SEQ ID NO: 123 - DNA, 50 bp, synthetic construct; identical to SEQ ID NO: 87
  source 1..50: mol_type = other DNA; note = Description of Artificial Sequence: Synthetic oligonucleotide; note = Description of Combined DNA/RNA Molecule: Synthetic oligonucleotide
  modified_base 1: mod_base = OTHER; note = 2'-O-methylguanosine phosphorothioate
  modified_base 2: mod_base = OTHER; note = 2'-O-methylcytidine phosphorothioate
  modified_base 3: mod_base = OTHER; note = 2'-O-methylguanosine phosphorothioate
  modified_base 4: mod_base = OTHER; note = 2'-O-methylcytidine phosphorothioate
  modified_base 5: mod_base = OTHER; note = 2'-O-methyluridine
  modified_base 6: mod_base = OTHER; note = 2'-O-methyluridine
  modified_base 7: mod_base = OTHER; note = 2'-O-methylcytidine
  modified_base 8: mod_base = OTHER; note = 2'-O-methyluridine
  modified_base 9: mod_base = OTHER; note = 2'-O-methyluridine
  modified_base 10: mod_base = OTHER; note = 2'-O-methylguanosine
  modified_base 11: mod_base = OTHER; note = 2'-O-methyladenosine
  modified_base 12: mod_base = OTHER; note = 2'-O-methyluridine
  modified_base 13: mod_base = OTHER; note = 2'-O-methylguanosine
  modified_base 14: mod_base = OTHER; note = 2'-O-methylguanosine
  modified_base 15: mod_base = OTHER; note = 2'-O-methylguanosine
  modified_base 16: mod_base = OTHER; note = 2'-O-methylguanosine
  modified_base 17: mod_base = OTHER; note = 2'-O-methyladenosine
  modified_base 18: mod_base = OTHER; note = 2'-O-methylguanosine
  modified_base 19: mod_base = OTHER; note = 2'-O-methyluridine
  modified_base 20: mod_base = OTHER; note = 2'-O-methyladenosine
  modified_base 21: mod_base = OTHER; note = 2'-O-methylcytidine
  modified_base 22: mod_base = OTHER; note = 2'-O-methylguanosine
  modified_base 23: mod_base = OTHER; note = 2'-O-methylguanosine
  modified_base 24: mod_base = OTHER; note = 2'-O-methyluridine
  modified_base 25: mod_base = OTHER; note = 2'-O-methylcytidine
  modified_base 26: mod_base = OTHER; note = 2'-O-methyluridine
  modified_base 27: mod_base = OTHER; note = 2'-O-methylcytidine
  modified_base 28: mod_base = OTHER; note = 2'-O-methylcytidine
  modified_base 29: mod_base = OTHER; note = 2'-O-methyluridine
  modified_base 30: mod_base = OTHER; note = 2'-O-methylguanosine
  modified_base 31: mod_base = OTHER; note = 2'-O-methylcytidine
  modified_base 32: mod_base = OTHER; note = 2'-O-methyladenosine
  modified_base 33: mod_base = OTHER; note = 2'-O-methylcytidine
  modified_base 34: mod_base = OTHER; note = 2'-O-methyladenosine
  modified_base 35: mod_base = OTHER; note = 2'-O-methylguanosine
  modified_base 38: mod_base = OTHER; note = (R)-glycol cytidine
  modified_base 39: mod_base = OTHER; note = 2'-O-methyladenosine
  modified_base 40: mod_base = OTHER; note = 2'-O-methylguanosine
  modified_base 41: mod_base = OTHER; note = 2'-O-methyladenosine
  modified_base 42: mod_base = OTHER; note = 2'-O-methyluridine
  modified_base 43: mod_base = OTHER; note = 2'-O-methyladenosine
  modified_base 44: mod_base = OTHER; note = 2'-O-methylguanosine
  modified_base 45: mod_base = OTHER; note = 2'-O-methyladenosine
  modified_base 46: mod_base = OTHER; note = 2'-O-methyladenosine phosphorothioate
  modified_base 47: mod_base = OTHER; note = 2'-O-methylguanosine phosphorothioate
  modified_base 48: mod_base = OTHER; note = 2'-O-methyladenosine phosphorothioate
  modified_base 49: mod_base = OTHER; note = 2'-O-methylcytidine phosphorothioate
  modified_base 50: mod_base = OTHER; note = 2'-O-methyluridine
  misc_feature 1..35: note = RNA
  misc_feature 36..37: note = DNA
  misc_feature 38..50: note = RNA

SEQ ID NO: 124 - DNA, 50 bp, synthetic construct; identical to SEQ ID NO: 87
  source 1..50: mol_type = other DNA; note = Description of Artificial Sequence: Synthetic oligonucleotide; note = Description of Combined DNA/RNA Molecule: Synthetic oligonucleotide
  modified_base 1: mod_base = OTHER; note = 2'-O-methylguanosine phosphorothioate
  modified_base 2: mod_base = OTHER; note = 2'-O-methylcytidine phosphorothioate
  modified_base 3: mod_base = OTHER; note = 2'-O-methylguanosine phosphorothioate
  modified_base 4: mod_base = OTHER; note = 2'-O-methylcytidine phosphorothioate
  modified_base 5: mod_base = OTHER; note = 2'-O-methyluridine
  modified_base 6: mod_base = OTHER; note = 2'-O-methyluridine
  modified_base 7: mod_base = OTHER; note = 2'-O-methylcytidine
  modified_base 8: mod_base = OTHER; note = 2'-O-methyluridine
  modified_base 9: mod_base = OTHER; note = 2'-O-methyluridine
  modified_base 10: mod_base = OTHER; note = 2'-O-methylguanosine
  modified_base 11: mod_base = OTHER; note = 2'-O-methyladenosine
  modified_base 12: mod_base = OTHER; note = 2'-O-methyluridine
  modified_base 13: mod_base = OTHER; note = 2'-O-methylguanosine
  modified_base 14: mod_base = OTHER; note = 2'-O-methylguanosine
  modified_base 15: mod_base = OTHER; note = 2'-O-methylguanosine
  modified_base 16: mod_base = OTHER; note = 2'-O-methylguanosine
  modified_base 17: mod_base = OTHER; note = 2'-O-methyladenosine
  modified_base 18: mod_base = OTHER; note = 2'-O-methylguanosine
  modified_base 19: mod_base = OTHER; note = 2'-O-methyluridine
  modified_base 20: mod_base = OTHER; note = 2'-O-methyladenosine
  modified_base 21: mod_base = OTHER; note = 2'-O-methylcytidine
  modified_base 22: mod_base = OTHER; note = 2'-O-methylguanosine
  modified_base 23: mod_base = OTHER; note = 2'-O-methylguanosine
  modified_base 24: mod_base = OTHER; note = 2'-O-methyluridine
  modified_base 25: mod_base = OTHER; note = 2'-O-methylcytidine
  modified_base 26: mod_base = OTHER; note = 2'-O-methyluridine
  modified_base 27: mod_base = OTHER; note = 2'-O-methylcytidine
  modified_base 28: mod_base = OTHER; note = 2'-O-methylcytidine
  modified_base 29: mod_base = OTHER; note = 2'-O-methyluridine
  modified_base 30: mod_base = OTHER; note = 2'-O-methylguanosine
  modified_base 31: mod_base = OTHER; note = 2'-O-methylcytidine
  modified_base 32: mod_base = OTHER; note = 2'-O-methyladenosine
  modified_base 33: mod_base = OTHER; note = 2'-O-methylcytidine
  modified_base 34: mod_base = OTHER; note = 2'-O-methyladenosine
  modified_base 35: mod_base = OTHER; note = 2'-O-methylguanosine
  modified_base 36: mod_base = OTHER; note = Serinol adenosine
  modified_base 39: mod_base = OTHER; note = 2'-O-methyladenosine
  modified_base 40: mod_base = OTHER; note = 2'-O-methylguanosine
  modified_base 41: mod_base = OTHER; note = 2'-O-methyladenosine
  modified_base 42: mod_base = OTHER; note = 2'-O-methyluridine
  modified_base 43: mod_base = OTHER; note = 2'-O-methyladenosine
  modified_base 44: mod_base = OTHER; note = 2'-O-methylguanosine
  modified_base 45: mod_base = OTHER; note = 2'-O-methyladenosine
  modified_base 46: mod_base = OTHER; note = 2'-O-methyladenosine phosphorothioate
  modified_base 47: mod_base = OTHER; note = 2'-O-methylguanosine phosphorothioate
  modified_base 48: mod_base = OTHER; note = 2'-O-methyladenosine phosphorothioate
  modified_base 49: mod_base = OTHER; note = 2'-O-methylcytidine phosphorothioate
  modified_base 50: mod_base = OTHER; note = 2'-O-methyluridine
  misc_feature 1..36: note = RNA
  misc_feature 37..38: note = DNA
  misc_feature 39..50: note = RNA

SEQ ID NO: 125 - DNA, 50 bp, synthetic construct; identical to SEQ ID NO: 87
  source 1..50: mol_type = other DNA; note = Description of Artificial Sequence: Synthetic oligonucleotide; note = Description of Combined DNA/RNA Molecule: Synthetic oligonucleotide
  modified_base 1: mod_base = OTHER; note = 2'-O-methylguanosine phosphorothioate
  modified_base 2: mod_base = OTHER; note = 2'-O-methylcytidine phosphorothioate
  modified_base 3: mod_base = OTHER; note = 2'-O-methylguanosine phosphorothioate
  modified_base 4: mod_base = OTHER; note = 2'-O-methylcytidine phosphorothioate
  modified_base 5: mod_base = OTHER; note = 2'-O-methyluridine
  modified_base 6: mod_base = OTHER; note = 2'-O-methyluridine
  modified_base 7: mod_base = OTHER; note = 2'-O-methylcytidine
  modified_base 8: mod_base = OTHER; note = 2'-O-methyluridine
  modified_base 9: mod_base = OTHER; note = 2'-O-methyluridine
  modified_base 10: mod_base = OTHER; note = 2'-O-methylguanosine
  modified_base 11: mod_base = OTHER; note = 2'-O-methyladenosine
  modified_base 12: mod_base = OTHER; note = 2'-O-methyluridine
  modified_base 13: mod_base = OTHER; note = 2'-O-methylguanosine
  modified_base 14: mod_base = OTHER; note = 2'-O-methylguanosine
  modified_base 15: mod_base = OTHER; note = 2'-O-methylguanosine
  modified_base 16: mod_base = OTHER; note = 2'-O-methylguanosine
  modified_base 17: mod_base = OTHER; note = 2'-O-methyladenosine
  modified_base 18: mod_base = OTHER; note = 2'-O-methylguanosine
  modified_base 19: mod_base = OTHER; note = 2'-O-methyluridine
  modified_base 20: mod_base = OTHER; note = 2'-O-methyladenosine
  modified_base 21: mod_base = OTHER; note = 2'-O-methylcytidine
  modified_base 22: mod_base = OTHER; note = 2'-O-methylguanosine
  modified_base 23: mod_base = OTHER; note = 2'-O-methylguanosine
  modified_base 24: mod_base = OTHER; note = 2'-O-methyluridine
  modified_base 25: mod_base = OTHER; note = 2'-O-methylcytidine
  modified_base 26: mod_base = OTHER; note = 2'-O-methyluridine
  modified_base 27: mod_base = OTHER; note = 2'-O-methylcytidine
  modified_base 28: mod_base = OTHER; note = 2'-O-methylcytidine
  modified_base 29: mod_base = OTHER; note = 2'-O-methyluridine
  modified_base 30: mod_base = OTHER; note = 2'-O-methylguanosine
  modified_base 31: mod_base = OTHER; note = 2'-O-methylcytidine
  modified_base 32: mod_base = OTHER; note = 2'-O-methyladenosine
  modified_base 33: mod_base = OTHER; note = 2'-O-methylcytidine
  modified_base 34: mod_base = OTHER; note = 2'-O-methyladenosine
  modified_base 35: mod_base = OTHER; note = 2'-O-methylguanosine
  modified_base 37: mod_base = OTHER; note = Serinol cytidine
  modified_base 39: mod_base = OTHER; note = 2'-O-methyladenosine
  modified_base 40: mod_base = OTHER; note = 2'-O-methylguanosine
  modified_base 41: mod_base = OTHER; note = 2'-O-methyladenosine
  modified_base 42: mod_base = OTHER; note = 2'-O-methyluridine
  modified_base 43: mod_base = OTHER; note = 2'-O-methyladenosine
  modified_base 44: mod_base = OTHER; note = 2'-O-methylguanosine
  modified_base 45: mod_base = OTHER; note = 2'-O-methyladenosine
  modified_base 46: mod_base = OTHER; note = 2'-O-methyladenosine phosphorothioate
  modified_base 47: mod_base = OTHER; note = 2'-O-methylguanosine phosphorothioate
  modified_base 48: mod_base = OTHER; note = 2'-O-methyladenosine phosphorothioate
  modified_base 49: mod_base = OTHER; note = 2'-O-methylcytidine phosphorothioate
  modified_base 50: mod_base = OTHER; note = 2'-O-methyluridine
  misc_feature 1..35: note = RNA
  misc_feature 36: note = DNA
  misc_feature 37: note = RNA
  misc_feature 38: note = DNA
  misc_feature 39..50: note = RNA

SEQ ID NO: 126 - DNA, 50 bp, synthetic construct; identical to SEQ ID NO: 87
  source 1..50: mol_type = other DNA; note = Description of Artificial Sequence: Synthetic oligonucleotide; note = Description of Combined DNA/RNA Molecule: Synthetic oligonucleotide
  modified_base 1: mod_base = OTHER; note = 2'-O-methylguanosine phosphorothioate
  modified_base 2: mod_base = OTHER; note = 2'-O-methylcytidine phosphorothioate
  modified_base 3: mod_base = OTHER; note = 2'-O-methylguanosine phosphorothioate
  modified_base 4: mod_base = OTHER; note = 2'-O-methylcytidine phosphorothioate
  modified_base 5: mod_base = OTHER; note = 2'-O-methyluridine
  modified_base 6: mod_base = OTHER; note = 2'-O-methyluridine
  modified_base 7: mod_base = OTHER; note = 2'-O-methylcytidine
  modified_base 8: mod_base = OTHER; note = 2'-O-methyluridine
  modified_base 9: mod_base = OTHER; note = 2'-O-methyluridine
  modified_base 10: mod_base = OTHER; note = 2'-O-methylguanosine
  modified_base 11: mod_base = OTHER; note = 2'-O-methyladenosine
  modified_base 12: mod_base = OTHER; note = 2'-O-methyluridine
  modified_base 13: mod_base = OTHER; note = 2'-O-methylguanosine
  modified_base 14: mod_base = OTHER; note = 2'-O-methylguanosine
  modified_base 15: mod_base = OTHER; note = 2'-O-methylguanosine
  modified_base 16: mod_base = OTHER; note = 2'-O-methylguanosine
  modified_base 17: mod_base = OTHER; note = 2'-O-methyladenosine
  modified_base 18: mod_base = OTHER; note = 2'-O-methylguanosine
  modified_base 19: mod_base = OTHER; note = 2'-O-methyluridine
  modified_base 20: mod_base = OTHER; note = 2'-O-methyladenosine
  modified_base 21: mod_base = OTHER; note = 2'-O-methylcytidine
  modified_base 22: mod_base = OTHER; note = 2'-O-methylguanosine
  modified_base 23: mod_base = OTHER; note = 2'-O-methylguanosine
  modified_base 24: mod_base = OTHER; note = 2'-O-methyluridine
  modified_base 25: mod_base = OTHER; note = 2'-O-methylcytidine
  modified_base 26: mod_base = OTHER; note = 2'-O-methyluridine
  modified_base 27: mod_base = OTHER; note = 2'-O-methylcytidine
  modified_base 28: mod_base = OTHER; note = 2'-O-methylcytidine
  modified_base 29: mod_base = OTHER; note = 2'-O-methyluridine
  modified_base 30: mod_base = OTHER; note = 2'-O-methylguanosine
  modified_base 31: mod_base = OTHER; note = 2'-O-methylcytidine
  modified_base 32: mod_base = OTHER; note = 2'-O-methyladenosine
  modified_base 33: mod_base = OTHER; note = 2'-O-methylcytidine
  modified_base 34: mod_base = OTHER; note = 2'-O-methyladenosine
  modified_base 35: mod_base = OTHER; note = 2'-O-methylguanosine
  modified_base 38: mod_base = OTHER; note = Serinol cytidine
  modified_base 39: mod_base = OTHER; note = 2'-O-methyladenosine
  modified_base 40: mod_base = OTHER; note = 2'-O-methylguanosine
  modified_base 41: mod_base = OTHER; note = 2'-O-methyladenosine
  modified_base 42: mod_base = OTHER; note = 2'-O-methyluridine
  modified_base 43: mod_base = OTHER; note = 2'-O-methyladenosine
  modified_base 44: mod_base = OTHER; note = 2'-O-methylguanosine
  modified_base 45: mod_base = OTHER; note = 2'-O-methyladenosine
  modified_base 46: mod_base = OTHER; note = 2'-O-methyladenosine phosphorothioate
  modified_base 47: mod_base = OTHER; note = 2'-O-methylguanosine phosphorothioate
  modified_base 48: mod_base = OTHER; note = 2'-O-methyladenosine phosphorothioate
  modified_base 49: mod_base = OTHER; note = 2'-O-methylcytidine phosphorothioate
  modified_base 50: mod_base = OTHER; note = 2'-O-methyluridine
  misc_feature 1..35: note = RNA
  misc_feature 36..37: note = DNA
  misc_feature 38..50: note = RNA

SEQ ID NO: 127 - DNA, 50 bp, synthetic construct; identical to SEQ ID NO: 87
  source 1..50: mol_type = other DNA; note = Description of Artificial Sequence: Synthetic oligonucleotide; note = Description of Combined DNA/RNA Molecule: Synthetic oligonucleotide
  modified_base 1: mod_base = OTHER; note = 2'-O-methylguanosine phosphorothioate
  modified_base 2: mod_base = OTHER; note = 2'-O-methylcytidine phosphorothioate
  modified_base 3: mod_base = OTHER; note = 2'-O-methylguanosine phosphorothioate
  modified_base 4: mod_base = OTHER; note = 2'-O-methylcytidine phosphorothioate
  modified_base 5: mod_base = OTHER; note = 2'-O-methyluridine
  modified_base 6: mod_base = OTHER; note = 2'-O-methyluridine
  modified_base 7: mod_base = OTHER; note = 2'-O-methylcytidine
  modified_base 8: mod_base = OTHER; note = 2'-O-methyluridine
  modified_base 9: mod_base = OTHER; note = 2'-O-methyluridine
  modified_base 10: mod_base = OTHER; note = 2'-O-methylguanosine
  modified_base 11: mod_base = OTHER; note = 2'-O-methyladenosine
  modified_base 12: mod_base = OTHER; note = 2'-O-methyluridine
  modified_base 13: mod_base = OTHER; note = 2'-O-methylguanosine
  modified_base 14: mod_base = OTHER; note = 2'-O-methylguanosine
  modified_base 15: mod_base = OTHER; note = 2'-O-methylguanosine
  modified_base 16: mod_base = OTHER; note = 2'-O-methylguanosine
  modified_base 17: mod_base = OTHER; note = 2'-O-methyladenosine
  modified_base 18: mod_base = OTHER; note = 2'-O-methylguanosine
  modified_base 19: mod_base = OTHER; note = 2'-O-methyluridine
  modified_base 20: mod_base = OTHER; note = 2'-O-methyladenosine
  modified_base 21: mod_base = OTHER; note = 2'-O-methylcytidine
  modified_base 22: mod_base = OTHER; note = 2'-O-methylguanosine
  modified_base 23: mod_base = OTHER; note = 2'-O-methylguanosine
  modified_base 24: mod_base = OTHER; note = 2'-O-methyluridine
  modified_base 25: mod_base = OTHER; note = 2'-O-methylcytidine
  modified_base 26: mod_base = OTHER; note = 2'-O-methyluridine
  modified_base 27: mod_base = OTHER; note = 2'-O-methylcytidine
  modified_base 28: mod_base = OTHER; note = 2'-O-methylcytidine
  modified_base 29: mod_base = OTHER; note = 2'-O-methyluridine
  modified_base 30: mod_base = OTHER; note = 2'-O-methylguanosine
  modified_base 31: mod_base = OTHER; note = 2'-O-methylcytidine
  modified_base 32: mod_base = OTHER; note = 2'-O-methyladenosine
  modified_base 33: mod_base = OTHER; note = 2'-O-methylcytidine
  modified_base 34: mod_base = OTHER; note = 2'-O-methyladenosine
  modified_base 35: mod_base = OTHER; note = 2'-O-methylguanosine
  modified_base 36: mod_base = OTHER; note = Flexible adenosine
  modified_base 39: mod_base = OTHER; note = 2'-O-methyladenosine
  modified_base 40: mod_base = OTHER; note = 2'-O-methylguanosine
  modified_base 41: mod_base = OTHER; note = 2'-O-methyladenosine
  modified_base 42: mod_base = OTHER; note = 2'-O-methyluridine
  modified_base 43: mod_base = OTHER; note = 2'-O-methyladenosine
  modified_base 44: mod_base = OTHER; note = 2'-O-methylguanosine
  modified_base 45: mod_base = OTHER; note = 2'-O-methyladenosine
  modified_base 46: mod_base = OTHER; note = 2'-O-methyladenosine phosphorothioate
  modified_base 47: mod_base = OTHER; note = 2'-O-methylguanosine phosphorothioate
  modified_base 48: mod_base = OTHER; note = 2'-O-methyladenosine phosphorothioate
  modified_base 49: mod_base = OTHER; note = 2'-O-methylcytidine phosphorothioate
  modified_base 50: mod_base = OTHER; note = 2'-O-methyluridine
  misc_feature 1..36: note = RNA
  misc_feature 37..38: note = DNA
  misc_feature 39..50: note = RNA

SEQ ID NO: 128 - DNA, 50 bp, synthetic construct; identical to SEQ ID NO: 87
  source 1..50: mol_type = other DNA; note = Description of Artificial Sequence: Synthetic oligonucleotide; note = Description of Combined DNA/RNA Molecule: Synthetic oligonucleotide
  modified_base 1: mod_base = OTHER; note = 2'-O-methylguanosine phosphorothioate
  modified_base 2: mod_base = OTHER; note = 2'-O-methylcytidine phosphorothioate
  modified_base 3: mod_base = OTHER; note = 2'-O-methylguanosine phosphorothioate
  modified_base 4: mod_base = OTHER; note = 2'-O-methylcytidine phosphorothioate
  modified_base 5: mod_base = OTHER; note = 2'-O-methyluridine
  modified_base 6: mod_base = OTHER; note = 2'-O-methyluridine
  modified_base 7: mod_base = OTHER; note = 2'-O-methylcytidine
  modified_base 8: mod_base = OTHER; note = 2'-O-methyluridine
  modified_base 9: mod_base = OTHER; note = 2'-O-methyluridine
  modified_base 10: mod_base = OTHER; note = 2'-O-methylguanosine
  modified_base 11: mod_base = OTHER; note = 2'-O-methyladenosine
  modified_base 12: mod_base = OTHER; note = 2'-O-methyluridine
  modified_base 13: mod_base = OTHER; note = 2'-O-methylguanosine
  modified_base 14: mod_base = OTHER; note = 2'-O-methylguanosine
  modified_base 15: mod_base = OTHER; note = 2'-O-methylguanosine
  modified_base 16: mod_base = OTHER; note = 2'-O-methylguanosine
  modified_base 17: mod_base = OTHER; note = 2'-O-methyladenosine
  modified_base 18: mod_base = OTHER; note = 2'-O-methylguanosine
  modified_base 19: mod_base = OTHER; note = 2'-O-methyluridine
  modified_base 20: mod_base = OTHER; note = 2'-O-methyladenosine
  modified_base 21: mod_base = OTHER; note = 2'-O-methylcytidine
  modified_base 22: mod_base = OTHER; note = 2'-O-methylguanosine
  modified_base 23: mod_base = OTHER; note = 2'-O-methylguanosine
  modified_base 24: mod_base = OTHER; note = 2'-O-methyluridine
  modified_base 25: mod_base = OTHER; note = 2'-O-methylcytidine
  modified_base 26: mod_base = OTHER; note = 2'-O-methyluridine
  modified_base 27: mod_base = OTHER; note = 2'-O-methylcytidine
  modified_base 28: mod_base = OTHER; note = 2'-O-methylcytidine
  modified_base 29: mod_base = OTHER; note = 2'-O-methyluridine
  modified_base 30: mod_base = OTHER; note = 2'-O-methylguanosine
  modified_base 31: mod_base = OTHER; note = 2'-O-methylcytidine
  modified_base 32: mod_base = OTHER; note = 2'-O-methyladenosine
  modified_base 33: mod_base = OTHER; note = 2'-O-methylcytidine
  modified_base 34: mod_base = OTHER; note = 2'-O-methyladenosine
  modified_base 35: mod_base = OTHER; note = 2'-O-methylguanosine
  modified_base 37: mod_base = OTHER; note = Flexible cytidine
  modified_base 39: mod_base = OTHER; note = 2'-O-methyladenosine
  modified_base 40: mod_base = OTHER; note = 2'-O-methylguanosine
  modified_base 41: mod_base = OTHER; note = 2'-O-methyladenosine
  modified_base 42: mod_base = OTHER; note = 2'-O-methyluridine
  modified_base 43: mod_base = OTHER; note = 2'-O-methyladenosine
  modified_base 44: mod_base = OTHER; note = 2'-O-methylguanosine
  modified_base 45: mod_base = OTHER; note = 2'-O-methyladenosine
  modified_base 46: mod_base = OTHER; note = 2'-O-methyladenosine phosphorothioate
  modified_base 47: mod_base = OTHER; note = 2'-O-methylguanosine phosphorothioate
  modified_base 48: mod_base = OTHER; note = 2'-O-methyladenosine phosphorothioate
  modified_base 49: mod_base = OTHER; note = 2'-O-methylcytidine phosphorothioate
  modified_base 50: mod_base = OTHER; note = 2'-O-methyluridine
  misc_feature 1..35: note = RNA
  misc_feature 36: note = DNA
  misc_feature 37: note = RNA
  misc_feature 38: note = DNA
  misc_feature 39..50: note = RNA

SEQ ID NO: 129 - DNA, 50 bp, synthetic construct; identical to SEQ ID NO: 87
  source 1..50: mol_type = other DNA; note = Description of Artificial Sequence: Synthetic oligonucleotide; note = Description of Combined DNA/RNA Molecule: Synthetic oligonucleotide
  modified_base 1: mod_base = OTHER; note = 2'-O-methylguanosine phosphorothioate
  modified_base 2: mod_base = OTHER; note = 2'-O-methylcytidine phosphorothioate
  modified_base 3: mod_base = OTHER; note = 2'-O-methylguanosine phosphorothioate
  modified_base 4: mod_base = OTHER; note = 2'-O-methylcytidine phosphorothioate
  modified_base 5: mod_base = OTHER; note = 2'-O-methyluridine
  modified_base 6: mod_base = OTHER; note = 2'-O-methyluridine
  modified_base 7: mod_base = OTHER; note = 2'-O-methylcytidine
  modified_base 8: mod_base = OTHER; note = 2'-O-methyluridine
  modified_base 9: mod_base = OTHER; note = 2'-O-methyluridine
  modified_base 10: mod_base = OTHER; note = 2'-O-methylguanosine
  modified_base 11: mod_base = OTHER; note = 2'-O-methyladenosine
  modified_base 12: mod_base = OTHER; note = 2'-O-methyluridine
  modified_base 13: mod_base = OTHER; note = 2'-O-methylguanosine
  modified_base 14: mod_base = OTHER; note = 2'-O-methylguanosine
  modified_base 15: mod_base = OTHER; note = 2'-O-methylguanosine
  modified_base 16: mod_base = OTHER; note = 2'-O-methylguanosine
  modified_base 17: mod_base = OTHER; note = 2'-O-methyladenosine
  modified_base 18: mod_base = OTHER; note = 2'-O-methylguanosine
  modified_base 19: mod_base = OTHER; note = 2'-O-methyluridine
  modified_base 20: mod_base = OTHER; note = 2'-O-methyladenosine
  modified_base 21: mod_base = OTHER; note = 2'-O-methylcytidine
  modified_base 22: mod_base = OTHER; note = 2'-O-methylguanosine
  modified_base 23: mod_base = OTHER; note = 2'-O-methylguanosine
  modified_base 24: mod_base = OTHER; note = 2'-O-methyluridine
  modified_base 25: mod_base = OTHER; note = 2'-O-methylcytidine
  modified_base 26: mod_base = OTHER; note = 2'-O-methyluridine
  modified_base 27: mod_base = OTHER; note = 2'-O-methylcytidine
  modified_base 28: mod_base = OTHER; note = 2'-O-methylcytidine
  modified_base 29: mod_base = OTHER; note = 2'-O-methyluridine
  modified_base 30: mod_base = OTHER; note = 2'-O-methylguanosine
  modified_base 31: mod_base = OTHER; note = 2'-O-methylcytidine
  modified_base 32: mod_base = OTHER; note = 2'-O-methyladenosine
  modified_base 33: mod_base = OTHER; note = 2'-O-methylcytidine
  modified_base 34: mod_base = OTHER; note = 2'-O-methyladenosine
  modified_base 35: mod_base = OTHER; note = 2'-O-methylguanosine
  modified_base 38: mod_base = OTHER; note = Flexible cytidine
  modified_base 39: mod_base = OTHER; note = 2'-O-methyladenosine
  modified_base 40: mod_base = OTHER; note = 2'-O-methylguanosine
  modified_base 41: mod_base = OTHER; note = 2'-O-methyladenosine
  modified_base 42: mod_base = OTHER; note = 2'-O-methyluridine
  modified_base 43: mod_base = OTHER; note = 2'-O-methyladenosine
  modified_base 44: mod_base = OTHER; note = 2'-O-methylguanosine
  modified_base 45: mod_base = OTHER; note = 2'-O-methyladenosine
  modified_base 46: mod_base = OTHER; note = 2'-O-methyladenosine phosphorothioate
  modified_base 47: mod_base = OTHER; note = 2'-O-methylguanosine phosphorothioate
  modified_base 48: mod_base = OTHER; note = 2'-O-methyladenosine phosphorothioate
  modified_base 49: mod_base = OTHER; note = 2'-O-methylcytidine phosphorothioate
  modified_base 50: mod_base = OTHER; note = 2'-O-methyluridine
  misc_feature 1..35: note = RNA
  misc_feature 36..37: note = DNA
  misc_feature 38..50: note = RNA

SEQ ID NO: 130 - DNA, 50 bp, synthetic construct; identical to SEQ ID NO: 87
  source 1..50: mol_type = other DNA; note = Description of Artificial Sequence: Synthetic oligonucleotide; note = Description of Combined DNA/RNA Molecule: Synthetic oligonucleotide
  modified_base 1: mod_base = OTHER; note = 2'-O-methylguanosine phosphorothioate
  modified_base 2: mod_base = OTHER; note = 2'-O-methylcytidine phosphorothioate
  modified_base 3: mod_base = OTHER; note = 2'-O-methylguanosine phosphorothioate
  modified_base 4: mod_base = OTHER; note = 2'-O-methylcytidine phosphorothioate
  modified_base 5: mod_base = OTHER; note = 2'-O-methyluridine
  modified_base 6: mod_base = OTHER; note = 2'-O-methyluridine
  modified_base 7: mod_base = OTHER; note = 2'-O-methylcytidine
  modified_base 8: mod_base = OTHER; note = 2'-O-methyluridine
  modified_base 9: mod_base = OTHER; note = 2'-O-methyluridine
  modified_base 10: mod_base = OTHER; note = 2'-O-methylguanosine
  modified_base 11: mod_base = OTHER; note = 2'-O-methyladenosine
  modified_base 12: mod_base = OTHER; note = 2'-O-methyluridine
  modified_base 13: mod_base = OTHER; note = 2'-O-methylguanosine
  modified_base 14: mod_base = OTHER; note = 2'-O-methylguanosine
  modified_base 15: mod_base = OTHER; note = 2'-O-methylguanosine
  modified_base 16: mod_base = OTHER; note = 2'-O-methylguanosine
  modified_base 17: mod_base = OTHER; note = 2'-O-methyladenosine
  modified_base 18: mod_base = OTHER; note = 2'-O-methylguanosine
  modified_base 19: mod_base = OTHER; note = 2'-O-methyluridine
  modified_base 20: mod_base = OTHER; note = 2'-O-methyladenosine
  modified_base 21: mod_base = OTHER; note = 2'-O-methylcytidine
  modified_base 22: mod_base = OTHER; note = 2'-O-methylguanosine
  modified_base 23: mod_base = OTHER; note = 2'-O-methylguanosine
  modified_base 24: mod_base = OTHER; note = 2'-O-methyluridine
  modified_base 25: mod_base = OTHER; note = 2'-O-methylcytidine
  modified_base 26: mod_base = OTHER; note = 2'-O-methyluridine
  modified_base 27: mod_base = OTHER; note = 2'-O-methylcytidine
  modified_base 28: mod_base = OTHER; note = 2'-O-methylcytidine
  modified_base 29: mod_base = OTHER; note = 2'-O-methyluridine
  modified_base 30: mod_base = OTHER; note = 2'-O-methylguanosine
  modified_base 31: mod_base = OTHER; note = 2'-O-methylcytidine
  modified_base 32: mod_base = OTHER; note = 2'-O-methyladenosine
  modified_base 33: mod_base = OTHER; note = 2'-O-methylcytidine
  modified_base 34: mod_base = OTHER; note = 2'-O-methyladenosine
  modified_base 35: mod_base = OTHER; note = 2'-O-methylguanosine
  modified_base 36: mod_base = OTHER; note = Beta-D-hexitol adenine
  modified_base 39: mod_base = OTHER; note = 2'-O-methyladenosine
  modified_base 40: mod_base = OTHER; note = 2'-O-methylguanosine
  modified_base 41: mod_base = OTHER; note = 2'-O-methyladenosine
  modified_base 42: mod_base = OTHER; note = 2'-O-methyluridine
  modified_base 43: mod_base = OTHER; note = 2'-O-methyladenosine
  modified_base 44: mod_base = OTHER; note = 2'-O-methylguanosine
  modified_base 45: mod_base = OTHER; note = 2'-O-methyladenosine
  modified_base 46: mod_base = OTHER; note = 2'-O-methyladenosine phosphorothioate
  modified_base 47: mod_base = OTHER; note = 2'-O-methylguanosine phosphorothioate
  modified_base 48: mod_base = OTHER; note = 2'-O-methyladenosine phosphorothioate
  modified_base 49: mod_base = OTHER; note = 2'-O-methylcytidine phosphorothioate
  modified_base 50: mod_base = OTHER; note = 2'-O-methyluridine
  misc_feature 1..36: note = RNA
  misc_feature 37..38: note = DNA
  misc_feature 39..50: note = RNA

SEQ ID NO: 131 - DNA, 50 bp, synthetic construct; identical to SEQ ID NO: 87
  source 1..50: mol_type = other DNA; note = Description of Artificial Sequence: Synthetic oligonucleotide; note = Description of Combined DNA/RNA Molecule: Synthetic oligonucleotide
  modified_base 1: mod_base = OTHER; note = 2'-O-methylguanosine phosphorothioate
  modified_base 2: mod_base = OTHER; note = 2'-O-methylcytidine phosphorothioate
  modified_base 3: mod_base = OTHER; note = 2'-O-methylguanosine phosphorothioate
  modified_base 4: mod_base = OTHER; note = 2'-O-methylcytidine phosphorothioate
  modified_base 5: mod_base = OTHER; note = 2'-O-methyluridine
  modified_base 6: mod_base = OTHER; note = 2'-O-methyluridine
  modified_base 7: mod_base = OTHER; note = 2'-O-methylcytidine
  modified_base 8: mod_base = OTHER; note = 2'-O-methyluridine
  modified_base 9: mod_base = OTHER; note = 2'-O-methyluridine
  modified_base 10: mod_base = OTHER; note = 2'-O-methylguanosine
  modified_base 11: mod_base = OTHER; note = 2'-O-methyladenosine
  modified_base 12: mod_base = OTHER; note = 2'-O-methyluridine
  modified_base 13: mod_base = OTHER; note = 2'-O-methylguanosine
  modified_base 14: mod_base = OTHER; note = 2'-O-methylguanosine
  modified_base 15: mod_base = OTHER; note = 2'-O-methylguanosine
  modified_base 16: mod_base = OTHER; note = 2'-O-methylguanosine
  modified_base 17: mod_base = OTHER; note = 2'-O-methyladenosine
  modified_base 18: mod_base = OTHER; note = 2'-O-methylguanosine
  modified_base 19: mod_base = OTHER; note = 2'-O-methyluridine
  modified_base 20: mod_base = OTHER; note = 2'-O-methyladenosine
  modified_base 21: mod_base = OTHER; note = 2'-O-methylcytidine
  modified_base 22: mod_base = OTHER; note = 2'-O-methylguanosine
  modified_base 23: mod_base = OTHER; note = 2'-O-methylguanosine
  modified_base 24: mod_base = OTHER; note = 2'-O-methyluridine
  modified_base 25: mod_base = OTHER; note = 2'-O-methylcytidine
  modified_base 26: mod_base = OTHER; note = 2'-O-methyluridine
  modified_base 27: mod_base = OTHER; note = 2'-O-methylcytidine
  modified_base 28: mod_base = OTHER; note = 2'-O-methylcytidine
  modified_base 29: mod_base = OTHER; note = 2'-O-methyluridine
  modified_base 30: mod_base = OTHER; note = 2'-O-methylguanosine
  modified_base 31: mod_base = OTHER; note = 2'-O-methylcytidine
  modified_base 32: mod_base = OTHER; note = 2'-O-methyladenosine
  modified_base 33: mod_base = OTHER; note = 2'-O-methylcytidine
  modified_base 34: mod_base = OTHER; note = 2'-O-methyladenosine
  modified_base 35: mod_base = OTHER; note = 2'-O-methylguanosine
  modified_base 37: mod_base = OTHER; note = Beta-D-hexitol cytidine
  modified_base 39: mod_base = OTHER; note = 2'-O-methyladenosine
  modified_base 40: mod_base = OTHER; note = 2'-O-methylguanosine
  modified_base 41: mod_base = OTHER; note = 2'-O-methyladenosine
  modified_base 42: mod_base = OTHER; note = 2'-O-methyluridine
  modified_base 43: mod_base = OTHER; note = 2'-O-methyladenosine
  modified_base 44: mod_base = OTHER; note = 2'-O-methylguanosine
  modified_base 45: mod_base = OTHER; note = 2'-O-methyladenosine
  modified_base 46: mod_base = OTHER; note = 2'-O-methyladenosine phosphorothioate
  modified_base 47: mod_base = OTHER; note = 2'-O-methylguanosine phosphorothioate
  modified_base 48: mod_base = OTHER; note = 2'-O-methyladenosine phosphorothioate
  modified_base 49: mod_base = OTHER; note = 2'-O-methylcytidine phosphorothioate
  modified_base 50: mod_base = OTHER; note = 2'-O-methyluridine
  misc_feature 1..35: note = RNA
  misc_feature 36: note = DNA
  misc_feature 37: note = RNA
  misc_feature 38: note = DNA
  misc_feature 39..50: note = RNA

SEQ ID NO: 132 - DNA, 50 bp, synthetic construct; identical to SEQ ID NO: 87
  source 1..50: mol_type = other DNA; note = Description of Artificial Sequence: Synthetic oligonucleotide; note = Description of Combined DNA/RNA Molecule: Synthetic oligonucleotide
  modified_base 1: mod_base = OTHER; note = 2'-O-methylguanosine phosphorothioate
  modified_base 2: mod_base = OTHER; note = 2'-O-methylcytidine phosphorothioate
  modified_base 3: mod_base = OTHER; note = 2'-O-methylguanosine phosphorothioate
  modified_base 4: mod_base = OTHER; note = 2'-O-methylcytidine phosphorothioate
  modified_base 5: mod_base = OTHER; note = 2'-O-methyluridine
  modified_base 6: mod_base = OTHER; note = 2'-O-methyluridine
  modified_base 7: mod_base = OTHER; note = 2'-O-methylcytidine
  modified_base 8: mod_base = OTHER; note = 2'-O-methyluridine
  modified_base 9: mod_base = OTHER; note = 2'-O-methyluridine
  modified_base 10: mod_base = OTHER; note = 2'-O-methylguanosine
  modified_base 11: mod_base = OTHER; note = 2'-O-methyladenosine
  modified_base 12: mod_base = OTHER; note = 2'-O-methyluridine
  modified_base 13: mod_base = OTHER; note = 2'-O-methylguanosine
  modified_base 14: mod_base = OTHER; note = 2'-O-methylguanosine
  modified_base 15: mod_base = OTHER; note = 2'-O-methylguanosine
  modified_base 16: mod_base = OTHER; note = 2'-O-methylguanosine
  modified_base 17: mod_base = OTHER; note = 2'-O-methyladenosine
  modified_base 18: mod_base = OTHER; note = 2'-O-methylguanosine
  modified_base 19: mod_base = OTHER; note = 2'-O-methyluridine
  modified_base 20: mod_base = OTHER; note = 2'-O-methyladenosine
  modified_base 21: mod_base = OTHER; note = 2'-O-methylcytidine
  modified_base 22: mod_base = OTHER; note = 2'-O-methylguanosine
  modified_base 23: mod_base = OTHER; note = 2'-O-methylguanosine
  modified_base 24: mod_base = OTHER; note = 2'-O-methyluridine
  modified_base 25: mod_base = OTHER; note = 2'-O-methylcytidine
  modified_base 26: mod_base = OTHER; note = 2'-O-methyluridine
  modified_base 27: mod_base = OTHER; note = 2'-O-methylcytidine
  modified_base 28: mod_base = OTHER; note = 2'-O-methylcytidine
  modified_base 29: mod_base = OTHER; note = 2'-O-methyluridine
  modified_base 30: mod_base = OTHER; note = 2'-O-methylguanosine
  modified_base 31: mod_base = OTHER; note = 2'-O-methylcytidine
  modified_base 32: mod_base = OTHER; note = 2'-O-methyladenosine
  modified_base 33: mod_base = OTHER; note = 2'-O-methylcytidine
  modified_base 34: mod_base = OTHER; note = 2'-O-methyladenosine
  modified_base 35: mod_base = OTHER; note = 2'-O-methylguanosine
  modified_base 38: mod_base = OTHER; note = Beta-D-hexitol cytidine
  modified_base 39: mod_base = OTHER; note = 2'-O-methyladenosine
  modified_base 40: mod_base = OTHER; note = 2'-O-methylguanosine
  modified_base 41: mod_base = OTHER; note = 2'-O-methyladenosine
  modified_base 42: mod_base = OTHER; note = 2'-O-methyluridine
  modified_base 43: mod_base = OTHER; note = 2'-O-methyladenosine
  modified_base 44: mod_base = OTHER; note = 2'-O-methylguanosine
  modified_base 45: mod_base = OTHER; note = 2'-O-methyladenosine
  modified_base 46: mod_base = OTHER; note = 2'-O-methyladenosine phosphorothioate
  modified_base 47: mod_base = OTHER; note = 2'-O-methylguanosine phosphorothioate
  modified_base 48: mod_base = OTHER; note = 2'-O-methyladenosine phosphorothioate
  modified_base 49: mod_base = OTHER; note = 2'-O-methylcytidine phosphorothioate
  modified_base 50: mod_base = OTHER; note = 2'-O-methyluridine
  misc_feature 1..35: note = RNA
  misc_feature 36..37: note = DNA
  misc_feature 38..50: note = RNA

SEQ ID NO: 133 - DNA, 50 bp, synthetic construct
  source 1..50: mol_type = other DNA; note = Description of Artificial Sequence: Synthetic oligonucleotide; note = Description of Combined DNA/RNA Molecule: Synthetic oligonucleotide
  modified_base 1: mod_base = OTHER; note = 2'-O-methylguanosine phosphorothioate
  modified_base 2: mod_base = OTHER; note = 2'-O-methylcytidine phosphorothioate
  modified_base 3: mod_base = OTHER; note = 2'-O-methylguanosine phosphorothioate
  modified_base 4: mod_base = OTHER; note = 2'-O-methylcytidine phosphorothioate
  modified_base 5: mod_base = OTHER; note = 2'-O-methyluridine
  modified_base 6: mod_base = OTHER; note = 2'-O-methyluridine
  modified_base 7: mod_base = OTHER; note = 2'-O-methylcytidine
  modified_base 8: mod_base = OTHER; note = 2'-O-methyluridine
  modified_base 9: mod_base = OTHER; note = 2'-O-methyluridine
  modified_base 10: mod_base = OTHER; note = 2'-O-methylguanosine
  modified_base 11: mod_base = OTHER; note = 2'-O-methyladenosine
  modified_base 12: mod_base = OTHER; note = 2'-O-methyluridine
  modified_base 13: mod_base = OTHER; note = 2'-O-methylguanosine
  modified_base 14: mod_base = OTHER; note = 2'-O-methylguanosine
  modified_base 15: mod_base = OTHER; note = 2'-O-methylguanosine
  modified_base 16: mod_base = OTHER; note = 2'-O-methylguanosine
  modified_base 17: mod_base = OTHER; note = 2'-O-methyladenosine
  modified_base 18: mod_base = OTHER; note = 2'-O-methylguanosine
  modified_base 19: mod_base = OTHER; note = 2'-O-methyluridine
  modified_base 20: mod_base = OTHER; note = 2'-O-methyladenosine
  modified_base 21: mod_base = OTHER; note = 2'-O-methylcytidine
  modified_base 22: mod_base = OTHER; note = 2'-O-methylguanosine
  modified_base 23: mod_base = OTHER; note = 2'-O-methylguanosine
  modified_base 24: mod_base = OTHER; note = 2'-O-methyluridine
  modified_base 25: mod_base = OTHER; note = 2'-O-methylcytidine
  modified_base 26: mod_base = OTHER; note = 2'-O-methyluridine
  modified_base 27: mod_base = OTHER; note = 2'-O-methylcytidine
  modified_base 28: mod_base = OTHER; note = 2'-O-methylcytidine
  modified_base 29: mod_base = OTHER; note = 2'-O-methyluridine
  modified_base 30: mod_base = OTHER; note = 2'-O-methylguanosine
  modified_base 31: mod_base = OTHER; note = 2'-O-methylcytidine
  modified_base 32: mod_base = OTHER; note = 2'-O-methyladenosine
  modified_base 33: mod_base = OTHER; note = 2'-O-methylcytidine
  modified_base 34: mod_base = OTHER; note = 2'-O-methyladenosine
  modified_base 35: mod_base = OTHER; note = 2'-O-methylguanosine
  modified_base 36: mod_base = OTHER; note = Inosine
  modified_base 39: mod_base = OTHER; note = 2'-O-methyladenosine
  modified_base 40: mod_base = OTHER; note = 2'-O-methylguanosine
  modified_base 41: mod_base = OTHER; note = 2'-O-methyladenosine
  modified_base 42: mod_base = OTHER; note = 2'-O-methyluridine
  modified_base 43: mod_base = OTHER; note = 2'-O-methyladenosine
  modified_base 44: mod_base = OTHER; note = 2'-O-methylguanosine
  modified_base 45: mod_base = OTHER; note = 2'-O-methyladenosine
  modified_base 46: mod_base = OTHER; note = 2'-O-methyladenosine phosphorothioate
  modified_base 47: mod_base = OTHER; note = 2'-O-methylguanosine phosphorothioate
  modified_base 48: mod_base = OTHER; note = 2'-O-methyladenosine phosphorothioate
  modified_base 49: mod_base = OTHER; note = 2'-O-methylcytidine phosphorothioate
  modified_base 50: mod_base = OTHER; note = 2'-O-methyluridine
  misc_feature 1..35: note = RNA
  misc_feature 36..38: note = DNA
  misc_feature 39..50: note = RNA
gcgcttcttgatggggagtacggtctcctgcacagnccagatagaagact

SEQ ID NO: 134 - DNA, 50 bp, synthetic construct; identical to SEQ ID NO: 115
  source 1..50: mol_type = other DNA; note = Description of Artificial Sequence: Synthetic oligonucleotide; note = Description of Combined DNA/RNA Molecule: Synthetic oligonucleotide
  modified_base 1: mod_base = OTHER; note = 2'-O-methylguanosine phosphorothioate
  modified_base 2: mod_base = OTHER; note = 2'-O-methylcytidine phosphorothioate
  modified_base 3: mod_base = OTHER; note = 2'-O-methylguanosine phosphorothioate
  modified_base 4: mod_base = OTHER; note = 2'-O-methylcytidine phosphorothioate
  modified_base 5: mod_base = OTHER; note = 2'-O-methyluridine
  modified_base 6: mod_base = OTHER; note = 2'-O-methyluridine
  modified_base 7: mod_base = OTHER; note = 2'-O-methylcytidine
  modified_base 8: mod_base = OTHER; note = 2'-O-methyluridine
  modified_base 9: mod_base = OTHER; note = 2'-O-methyluridine
  modified_base 10: mod_base = OTHER; note = 2'-O-methylguanosine
  modified_base 11: mod_base = OTHER; note = 2'-O-methyladenosine
  modified_base 12: mod_base = OTHER; note = 2'-O-methyluridine
  modified_base 13: mod_base = OTHER; note = 2'-O-methylguanosine
  modified_base 14: mod_base = OTHER; note = 2'-O-methylguanosine
  modified_base 15: mod_base = OTHER; note = 2'-O-methylguanosine
  modified_base 16: mod_base = OTHER; note = 2'-O-methylguanosine
  modified_base 17: mod_base = OTHER; note = 2'-O-methyladenosine
  modified_base 18: mod_base = OTHER; note = 2'-O-methylguanosine
  modified_base 19: mod_base = OTHER; note = 2'-O-methyluridine
  modified_base 20: mod_base = OTHER; note = 2'-O-methyladenosine
  modified_base 21: mod_base = OTHER; note = 2'-O-methylcytidine
  modified_base 22: mod_base = OTHER; note = 2'-O-methylguanosine
  modified_base 23: mod_base = OTHER; note = 2'-O-methylguanosine
  modified_base 24: mod_base = OTHER; note = 2'-O-methyluridine
  modified_base 25: mod_base = OTHER; note = 2'-O-methylcytidine
  modified_base 26: mod_base = OTHER; note = 2'-O-methyluridine
  modified_base 27: mod_base = OTHER; note = 2'-O-methylcytidine
  modified_base 28: mod_base = OTHER; note = 2'-O-methylcytidine
  modified_base 29: mod_base = OTHER; note = 2'-O-methyluridine
  modified_base 30: mod_base = OTHER; note = 2'-O-methylguanosine
  modified_base 31: mod_base = OTHER; note = 2'-O-methylcytidine
  modified_base 32: mod_base = OTHER; note = 2'-O-methyladenosine
  modified_base 33: mod_base = OTHER; note = 2'-O-methylcytidine
  modified_base 34: mod_base = OTHER; note = 2'-O-methyladenosine
  modified_base 35: mod_base = OTHER; note = 2'-O-methylguanosine
  modified_base 37: mod_base = OTHER; note = Inosine
  modified_base 39: mod_base = OTHER; note = 2'-O-methyladenosine
  modified_base 40: mod_base = OTHER; note = 2'-O-methylguanosine
  modified_base 41: mod_base = OTHER; note = 2'-O-methyladenosine
  modified_base 42: mod_base = OTHER; note = 2'-O-methyluridine
  modified_base 43: mod_base = OTHER; note = 2'-O-methyladenosine
  modified_base 44: mod_base = OTHER; note = 2'-O-methylguanosine
  modified_base 45: mod_base = OTHER; note = 2'-O-methyladenosine
  modified_base 46: mod_base = OTHER; note = 2'-O-methyladenosine phosphorothioate
  modified_base 47: mod_base = OTHER; note = 2'-O-methylguanosine phosphorothioate
  modified_base 48: mod_base = OTHER; note = 2'-O-methyladenosine phosphorothioate
  modified_base 49: mod_base = OTHER; note = 2'-O-methylcytidine phosphorothioate
  modified_base 50: mod_base = OTHER; note = 2'-O-methyluridine
  misc_feature 1..35: note = RNA
  misc_feature 36..38: note = DNA
  misc_feature 39..50: note = RNA

SEQ ID NO: 135 - DNA, 50 bp, synthetic construct
  source 1..50: mol_type = other DNA; note = Description of Artificial Sequence: Synthetic oligonucleotide; note = Description of Combined DNA/RNA Molecule: Synthetic oligonucleotide
  modified_base 1: mod_base = OTHER; note = 2'-O-methylguanosine phosphorothioate
  modified_base 2: mod_base = OTHER; note = 2'-O-methylcytidine phosphorothioate
  modified_base 3: mod_base = OTHER; note = 2'-O-methylguanosine phosphorothioate
  modified_base 4: mod_base = OTHER; note = 2'-O-methylcytidine phosphorothioate
  modified_base 5: mod_base = OTHER; note = 2'-O-methyluridine
  modified_base 6: mod_base = OTHER; note = 2'-O-methyluridine
  modified_base 7: mod_base = OTHER; note = 2'-O-methylcytidine
  modified_base 8: mod_base = OTHER; note = 2'-O-methyluridine
  modified_base 9: mod_base = OTHER; note = 2'-O-methyluridine
  modified_base 10: mod_base = OTHER; note = 2'-O-methylguanosine
  modified_base 11: mod_base = OTHER; note = 2'-O-methyladenosine
  modified_base 12: mod_base = OTHER; note = 2'-O-methyluridine
  modified_base 13: mod_base = OTHER; note = 2'-O-methylguanosine
  modified_base 14: mod_base = OTHER; note = 2'-O-methylguanosine
  modified_base 15: mod_base = OTHER; note = 2'-O-methylguanosine
  modified_base 16: mod_base = OTHER; note = 2'-O-methylguanosine
  modified_base 17: mod_base = OTHER; note = 2'-O-methyladenosine
  modified_base 18: mod_base = OTHER; note = 2'-O-methylguanosine
  modified_base 19: mod_base = OTHER; note = 2'-O-methyluridine
  modified_base 20: mod_base = OTHER; note = 2'-O-methyladenosine
  modified_base 21: mod_base = OTHER; note = 2'-O-methylcytidine
  modified_base 22: mod_base = OTHER; note = 2'-O-methylguanosine
  modified_base 23: mod_base = OTHER; note = 2'-O-methylguanosine
  modified_base 24: mod_base = OTHER; note = 2'-O-methyluridine
  modified_base 25: mod_base = OTHER; note = 2'-O-methylcytidine
  modified_base 26: mod_base = OTHER; note = 2'-O-methyluridine
  modified_base 27: mod_base = OTHER; note = 2'-O-methylcytidine
  modified_base 28: mod_base = OTHER; note = 2'-O-methylcytidine
  modified_base 29: mod_base = OTHER; note = 2'-O-methyluridine
  modified_base 30: mod_base = OTHER; note = 2'-O-methylguanosine
  modified_base 31: mod_base = OTHER; note = 2'-O-methylcytidine
  modified_base 32: mod_base = OTHER; note = 2'-O-methyladenosine
  modified_base 33: mod_base = OTHER; note = 2'-O-methylcytidine
  modified_base 34: mod_base = OTHER; note = 2'-O-methyladenosine
  modified_base 35: mod_base = OTHER; note = 2'-O-methylguanosine
  modified_base 38: mod_base = OTHER; note = Inosine
  modified_base 39: mod_base = OTHER; note = 2'-O-methyladenosine
  modified_base 40: mod_base = OTHER; note = 2'-O-methylguanosine
  modified_base 41: mod_base = OTHER; note = 2'-O-methyladenosine
  modified_base 42: mod_base = OTHER; note = 2'-O-methyluridine
  modified_base 43: mod_base = OTHER; note = 2'-O-methyladenosine
  modified_base 44: mod_base = OTHER; note = 2'-O-methylguanosine
  modified_base 45: mod_base = OTHER; note = 2'-O-methyladenosine
  modified_base 46: mod_base = OTHER; note = 2'-O-methyladenosine phosphorothioate
  modified_base 47: mod_base = OTHER; note = 2'-O-methylguanosine phosphorothioate
  modified_base 48: mod_base = OTHER; note = 2'-O-methyladenosine phosphorothioate
  modified_base 49: mod_base = OTHER; note = 2'-O-methylcytidine phosphorothioate
  modified_base 50: mod_base = OTHER; note = 2'-O-methyluridine
  misc_feature 1..35: note = RNA
  misc_feature 36..38: note = DNA
  misc_feature 39..50: note = RNA
gcgcttcttgatggggagtacggtctcctgcacagacnagatagaagact

SEQ ID NO: 136 - DNA, 50 bp, synthetic construct
  source 1..50: mol_type = other DNA; note = Description of Artificial Sequence: Synthetic oligonucleotide; note = Description of Combined DNA/RNA Molecule: Synthetic oligonucleotide
  modified_base 1: mod_base = OTHER; note = 2'-O-methylguanosine phosphorothioate
  modified_base 2: mod_base = OTHER; note = 2'-O-methylcytidine phosphorothioate
  modified_base 3: mod_base = OTHER; note = 2'-O-methylguanosine phosphorothioate
  modified_base 4: mod_base = OTHER; note = 2'-O-methylcytidine phosphorothioate
  modified_base 5: mod_base = OTHER; note = 2'-O-methyluridine
  modified_base 6: mod_base = OTHER; note = 2'-O-methyluridine
  modified_base 7: mod_base = OTHER; note = 2'-O-methylcytidine
  modified_base 8: mod_base = OTHER; note = 2'-O-methyluridine
  modified_base 9: mod_base = OTHER; note = 2'-O-methyluridine
  modified_base 10: mod_base = OTHER; note = 2'-O-methylguanosine
  modified_base 11: mod_base = OTHER; note = 2'-O-methyladenosine
  modified_base 12: mod_base = OTHER; note = 2'-O-methyluridine
  modified_base 13: mod_base = OTHER; note = 2'-O-methylguanosine
  modified_base 14: mod_base = OTHER; note = 2'-O-methylguanosine
  modified_base 15: mod_base = OTHER; note = 2'-O-methylguanosine
  modified_base 16: mod_base = OTHER; note = 2'-O-methylguanosine
  modified_base 17: mod_base = OTHER; note = 2'-O-methyladenosine
  modified_base 18: mod_base = OTHER; note = 2'-O-methylguanosine
  modified_base 19: mod_base = OTHER; note = 2'-O-methyluridine
  modified_base 20: mod_base = OTHER; note = 2'-O-methyladenosine
  modified_base 21: mod_base = OTHER; note = 2'-O-methylcytidine
  modified_base 22: mod_base = OTHER; note = 2'-O-methylguanosine
  modified_base 23: mod_base = OTHER; note = 2'-O-methylguanosine
  modified_base 24: mod_base = OTHER; note = 2'-O-methyluridine
  modified_base 25: mod_base = OTHER; note = 2'-O-methylcytidine
  modified_base 26: mod_base = OTHER; note = 2'-O-methyluridine
  modified_base 27: mod_base = OTHER; note = 2'-O-methylcytidine
  modified_base 28: mod_base = OTHER; note = 2'-O-methylcytidine
  modified_base 29: mod_base = OTHER; note = 2'-O-methyluridine
  modified_base 30: mod_base = OTHER; note = 2'-O-methylguanosine
  modified_base 31: mod_base = OTHER; note = 2'-O-methylcytidine
  modified_base 32: mod_base = OTHER; note = 2'-O-methyladenosine
  modified_base 33: mod_base = OTHER; note = 2'-O-methylcytidine
  modified_base 34: mod_base = OTHER; note = 2'-O-methyladenosine
  modified_base 35: mod_base = OTHER; note = 2'-O-methylguanosine
  modified_base 36: mod_base = OTHER; note = Inosine
  modified_base 37: mod_base = OTHER; note = Inosine
  modified_base 39: mod_base = OTHER; note = 2'-O-methyladenosine
  modified_base 40: mod_base = OTHER; note = 2'-O-methylguanosine
  modified_base 41: mod_base = OTHER; note = 2'-O-methyladenosine
  modified_base 42: mod_base = OTHER; note = 2'-O-methyluridine
  modified_base 43: mod_base = OTHER; note = 2'-O-methyladenosine
  modified_base 44: mod_base = OTHER; note = 2'-O-methylguanosine
  modified_base 45: mod_base = OTHER; note = 2'-O-methyladenosine
  modified_base 46: mod_base = OTHER; note = 2'-O-methyladenosine phosphorothioate
  modified_base 47: mod_base = OTHER; note = 2'-O-methylguanosine phosphorothioate
  modified_base 48: mod_base = OTHER; note = 2'-O-methyladenosine phosphorothioate
  modified_base 49: mod_base = OTHER; note = 2'-O-methylcytidine phosphorothioate
  modified_base 50: mod_base = OTHER; note = 2'-O-methyluridine
  misc_feature 1..35: note = RNA
  misc_feature 36..38: note = DNA
  misc_feature 39..50: note = RNA
gcgcttcttgatggggagtacggtctcctgcacagnncagatagaagact

SEQ ID NO: 137 - DNA, 50 bp, synthetic construct
  source 1..50: mol_type = other DNA; note = Description of Artificial Sequence: Synthetic oligonucleotide; note = Description of Combined DNA/RNA Molecule: Synthetic oligonucleotide
  modified_base 1: mod_base = OTHER; note = 2'-O-methylguanosine phosphorothioate
  modified_base 2: mod_base = OTHER; note = 2'-O-methylcytidine phosphorothioate
  modified_base 3: mod_base = OTHER; note = 2'-O-methylguanosine phosphorothioate
  modified_base 4: mod_base = OTHER; note = 2'-O-methylcytidine phosphorothioate
  modified_base 5: mod_base = OTHER; note = 2'-O-methyluridine
  modified_base 6: mod_base = OTHER; note = 2'-O-methyluridine
  modified_base 7: mod_base = OTHER; note = 2'-O-methylcytidine
  modified_base 8: mod_base = OTHER; note = 2'-O-methyluridine
  modified_base 9: mod_base = OTHER; note = 2'-O-methyluridine
  modified_base 10: mod_base = OTHER; note = 2'-O-methylguanosine
  modified_base 11: mod_base = OTHER; note = 2'-O-methyladenosine
  modified_base 12: mod_base = OTHER; note = 2'-O-methyluridine
  modified_base 13: mod_base = OTHER; note = 2'-O-methylguanosine
  modified_base 14: mod_base = OTHER; note = 2'-O-methylguanosine
  modified_base 15: mod_base = OTHER; note = 2'-O-methylguanosine
  modified_base 16: mod_base = OTHER; note = 2'-O-methylguanosine
  modified_base 17: mod_base = OTHER; note = 2'-O-methyladenosine
  modified_base 18: mod_base = OTHER; note = 2'-O-methylguanosine
  modified_base 19: mod_base = OTHER; note = 2'-O-methyluridine
  modified_base 20: mod_base = OTHER; note = 2'-O-methyladenosine
  modified_base 21: mod_base = OTHER; note = 2'-O-methylcytidine
  modified_base 22: mod_base = OTHER; note = 2'-O-methylguanosine
  modified_base 23: mod_base = OTHER; note = 2'-O-methylguanosine
  modified_base 24: mod_base = OTHER; note = 2'-O-methyluridine
  modified_base 25: mod_base = OTHER; note = 2'-O-methylcytidine
  modified_base 26: mod_base = OTHER; note = 2'-O-methyluridine
  modified_base 27: mod_base = OTHER; note = 2'-O-methylcytidine
  modified_base 28: mod_base = OTHER; note = 2'-O-methylcytidine
  modified_base 29: mod_base = OTHER; note = 2'-O-methyluridine
  modified_base 30: mod_base = OTHER; note = 2'-O-methylguanosine
  modified_base 31: mod_base = OTHER; note = 2'-O-methylcytidine
  modified_base 32: mod_base = OTHER; note = 2'-O-methyladenosine
  modified_base 33: mod_base = OTHER; note = 2'-O-methylcytidine
  modified_base 34: mod_base = OTHER; note = 2'-O-methyladenosine
  modified_base 35: mod_base = OTHER; note = 2'-O-methylguanosine
  modified_base 37: mod_base = OTHER; note = Inosine
  modified_base 38: mod_base = OTHER; note = Inosine
  modified_base 39: mod_base = OTHER; note = 2'-O-methyladenosine
  modified_base 40: mod_base = OTHER; note = 2'-O-methylguanosine
  modified_base 41: mod_base = OTHER; note = 2'-O-methyladenosine
  modified_base 42: mod_base = OTHER; note = 2'-O-methyluridine
  modified_base 43: mod_base = OTHER; note = 2'-O-methyladenosine
  modified_base 44: mod_base = OTHER; note = 2'-O-methylguanosine
  modified_base 45: mod_base = OTHER; note = 2'-O-methyladenosine
  modified_base 46: mod_base = OTHER; note = 2'-O-methyladenosine phosphorothioate
  modified_base 47: mod_base = OTHER; note = 2'-O-methylguanosine phosphorothioate
  modified_base 48: mod_base = OTHER; note = 2'-O-methyladenosine phosphorothioate
  modified_base 49: mod_base = OTHER; note = 2'-O-methylcytidine phosphorothioate
  modified_base 50: mod_base = OTHER; note = 2'-O-methyluridine
  misc_feature 1..35: note = RNA
  misc_feature 36..38: note = DNA
  misc_feature 39..50: note = RNA
gcgcttcttgatggggagtacggtctcctgcacagannagatagaagact

SEQ ID NO: 138 - DNA, 50 bp, synthetic construct
  source 1..50: mol_type = other DNA; note = Description of Artificial Sequence: Synthetic oligonucleotide; note = Description of Combined DNA/RNA Molecule: Synthetic oligonucleotide
  modified_base 1: mod_base = OTHER; note = 2'-O-methylguanosine phosphorothioate
  modified_base 2: mod_base = OTHER; note = 2'-O-methylcytidine phosphorothioate
  modified_base 3: mod_base = OTHER; note = 2'-O-methylguanosine phosphorothioate
  modified_base 4: mod_base = OTHER; note = 2'-O-methylcytidine phosphorothioate
  modified_base 5: mod_base = OTHER; note = 2'-O-methyluridine
  modified_base 6: mod_base = OTHER; note = 2'-O-methyluridine
  modified_base 7: mod_base = OTHER; note = 2'-O-methylcytidine
  modified_base 8: mod_base = OTHER; note = 2'-O-methyluridine
  modified_base 9: mod_base = OTHER; note = 2'-O-methyluridine
  modified_base 10: mod_base = OTHER; note = 2'-O-methylguanosine
  modified_base 11: mod_base = OTHER; note = 2'-O-methyladenosine
  modified_base 12: mod_base = OTHER; note = 2'-O-methyluridine
  modified_base 13: mod_base = OTHER; note = 2'-O-methylguanosine
  modified_base 14: mod_base = OTHER; note = 2'-O-methylguanosine
  modified_base 15: mod_base = OTHER; note = 2'-O-methylguanosine
  modified_base 16: mod_base = OTHER; note = 2'-O-methylguanosine
  modified_base 17: mod_base = OTHER; note = 2'-O-methyladenosine
  modified_base 18: mod_base = OTHER; note = 2'-O-methylguanosine
  modified_base 19: mod_base = OTHER; note = 2'-O-methyluridine
  modified_base 20: mod_base = OTHER; note = 2'-O-methyladenosine
  modified_base 21: mod_base = OTHER; note = 2'-O-methylcytidine
  modified_base 22: mod_base = OTHER; note = 2'-O-methylguanosine
  modified_base 23: mod_base = OTHER; note = 2'-O-methylguanosine
  modified_base 24: mod_base = OTHER; note = 2'-O-methyluridine
  modified_base 25: mod_base = OTHER; note = 2'-O-methylcytidine
  modified_base 26: mod_base = OTHER; note = 2'-O-methyluridine
  modified_base 27: mod_base = OTHER; note = 2'-O-methylcytidine
  modified_base 28: mod_base = OTHER; note = 2'-O-methylcytidine
  modified_base 29: mod_base = OTHER; note = 2'-O-methyluridine
  modified_base 30: mod_base = OTHER; note = 2'-O-methylguanosine
  modified_base 31: mod_base = OTHER; note = 2'-O-methylcytidine
  modified_base 32: mod_base = OTHER; note = 2'-O-methyladenosine
  modified_base 33: mod_base = OTHER; note = 2'-O-methylcytidine
  modified_base 34: mod_base = OTHER; note = 2'-O-methyladenosine
  modified_base 35: mod_base = OTHER; note = 2'-O-methylguanosine
  modified_base 36: mod_base = OTHER; note = Inosine
  modified_base 38: mod_base = OTHER; note = Inosine
  modified_base 39: mod_base = OTHER; note = 2'-O-methyladenosine
  modified_base 40: mod_base = OTHER; note = 2'-O-methylguanosine
  modified_base 41: mod_base = OTHER; note = 2'-O-methyladenosine
  modified_base 42: mod_base = OTHER; note = 2'-O-methyluridine
  modified_base 43: mod_base = OTHER; note = 2'-O-methyladenosine
  modified_base 44: mod_base = OTHER; note = 2'-O-methylguanosine
  modified_base 45: mod_base = OTHER; note = 2'-O-methyladenosine
  modified_base 46: mod_base = OTHER; note = 2'-O-methyladenosine phosphorothioate
  modified_base 47: mod_base = OTHER; note = 2'-O-methylguanosine phosphorothioate
  modified_base 48: mod_base = OTHER; note = 2'-O-methyladenosine phosphorothioate
  modified_base 49: mod_base = OTHER; note = 2'-O-methylcytidine phosphorothioate
  modified_base 50: mod_base = OTHER; note = 2'-O-methyluridine
  misc_feature 1..35: note = RNA
  misc_feature 36..38: note = DNA
  misc_feature 39..50: note = RNA
gcgcttcttgatggggagtacggtctcctgcacagncnagatagaagact

SEQ ID NO: 139 - DNA, 50 bp, synthetic construct
  source 1..50: mol_type = other DNA; note = Description of Artificial Sequence: Synthetic oligonucleotide; note = Description of Combined DNA/RNA Molecule: Synthetic oligonucleotide
  modified_base 1: mod_base = OTHER; note = 2'-O-methylguanosine phosphorothioate
  modified_base 2: mod_base = OTHER; note = 2'-O-methylcytidine phosphorothioate
  modified_base 3: mod_base = OTHER; note = 2'-O-methylguanosine phosphorothioate
  modified_base 4: mod_base = OTHER; note = 2'-O-methylcytidine phosphorothioate
  modified_base 5: mod_base = OTHER; note = 2'-O-methyluridine
  modified_base 6: mod_base = OTHER; note = 2'-O-methyluridine
  modified_base 7: mod_base = OTHER; note = 2'-O-methylcytidine
  modified_base 8: mod_base = OTHER; note = 2'-O-methyluridine
  modified_base 9: mod_base = OTHER; note = 2'-O-methyluridine
  modified_base 10: mod_base = OTHER; note = 2'-O-methylguanosine
  modified_base 11: mod_base = OTHER; note = 2'-O-methyladenosine
  modified_base 12: mod_base = OTHER; note = 2'-O-methyluridine
  modified_base 13: mod_base = OTHER; note = 2'-O-methylguanosine
  modified_base 14: mod_base = OTHER; note = 2'-O-methylguanosine
  modified_base 15: mod_base = OTHER; note = 2'-O-methylguanosine
  modified_base 16: mod_base = OTHER; note = 2'-O-methylguanosine
  modified_base 17: mod_base = OTHER; note = 2'-O-methyladenosine
  modified_base 18: mod_base = OTHER; note = 2'-O-methylguanosine
  modified_base 19: mod_base = OTHER; note = 2'-O-methyluridine
  modified_base 20: mod_base = OTHER; note = 2'-O-methyladenosine
  modified_base 21: mod_base = OTHER; note = 2'-O-methylcytidine
  modified_base 22: mod_base = OTHER; note = 2'-O-methylguanosine
  modified_base 23: mod_base = OTHER; note = 2'-O-methylguanosine
  modified_base 24: mod_base = OTHER; note = 2'-O-methyluridine
  modified_base 25: mod_base = OTHER; note = 2'-O-methylcytidine
  modified_base 26: mod_base = OTHER; note = 2'-O-methyluridine
  modified_base 27: mod_base = OTHER; note = 2'-O-methylcytidine
  modified_base 28: mod_base = OTHER; note = 2'-O-methylcytidine
  modified_base 29: mod_base = OTHER; note = 2'-O-methyluridine
  modified_base 30: mod_base = OTHER; note = 2'-O-methylguanosine
  modified_base 31: mod_base = OTHER; note = 2'-O-methylcytidine
  modified_base 32: mod_base = OTHER; note = 2'-O-methyladenosine
  modified_base 33: mod_base = OTHER; note = 2'-O-methylcytidine
  modified_base 34: mod_base = OTHER; note = 2'-O-methyladenosine
  modified_base 35: mod_base = OTHER; note = 2'-O-methylguanosine
  modified_base 36: mod_base = OTHER; note = Inosine
  modified_base 37: mod_base = OTHER; note = Inosine
  modified_base 38: mod_base = OTHER; note = Inosine
  modified_base 39: mod_base = OTHER; note = 2'-O-methyladenosine
  modified_base 40: mod_base = OTHER; note = 2'-O-methylguanosine
  modified_base 41: mod_base = OTHER; note = 2'-O-methyladenosine
  modified_base 42: mod_base = OTHER; note = 2'-O-methyluridine
  modified_base 43: mod_base = OTHER; note = 2'-O-methyladenosine
  modified_base 44: mod_base = OTHER; note = 2'-O-methylguanosine
  modified_base 45: mod_base = OTHER; note = 2'-O-methyladenosine
  modified_base 46: mod_base = OTHER; note = 2'-O-methyladenosine phosphorothioate
  modified_base 47: mod_base = OTHER; note = 2'-O-methylguanosine phosphorothioate
  modified_base 48: mod_base = OTHER; note = 2'-O-methyladenosine phosphorothioate
  modified_base 49: mod_base = OTHER; note = 2'-O-methylcytidine phosphorothioate
  modified_base 50: mod_base = OTHER; note = 2'-O-methyluridine
  misc_feature 1..35: note = RNA
  misc_feature 36..38: note = DNA
  misc_feature 39..50: note = RNA
gcgcttcttgatggggagtacggtctcctgcacagnnnagatagaagact

SEQ ID NO: 140 - DNA, 63 bp, synthetic construct; identical to SEQ ID NO: 83
  source 1..63: mol_type = other DNA; note = Description of Artificial Sequence: Synthetic oligonucleotide; note = Description of Combined DNA/RNA Molecule: Synthetic oligonucleotide
  modified_base 1: mod_base = OTHER; note = 2'-O-methylguanosine phosphorothioate
  modified_base 2: mod_base = OTHER; note = 2'-O-methyluridine phosphorothioate
  modified_base 3: mod_base = OTHER; note = 2'-O-methylguanosine phosphorothioate
  modified_base 4: mod_base = OTHER; note = 2'-O-methylguanosine phosphorothioate
  modified_base 5: mod_base = OTHER; note = 2'-O-methyladenosine
  modified_base 6: mod_base = OTHER; note = 2'-O-methyladenosine
  modified_base 7: mod_base = OTHER; note = 2'-O-methyluridine
  modified_base 8: mod_base = OTHER; note = 2'-O-methyladenosine
  modified_base 9: mod_base = OTHER; note = 2'-O-methylguanosine
  modified_base 10: mod_base = OTHER; note = 2'-O-methyluridine
  modified_base 11: mod_base = OTHER; note = 2'-O-methyladenosine
  modified_base 12: mod_base = OTHER; note = 2'-O-methyluridine
  modified_base 13: mod_base = OTHER; note = 2'-O-methyladenosine
  modified_base 14: mod_base = OTHER; note = 2'-O-methyladenosine
  modified_base 15: mod_base = OTHER; note = 2'-O-methylcytidine
  modified_base 16: mod_base = OTHER; note = 2'-O-methyladenosine
  modified_base 17: mod_base = OTHER; note = 2'-O-methyladenosine
  modified_base 18: mod_base = OTHER; note = 2'-O-methyluridine
  modified_base 19: mod_base = OTHER; note = 2'-O-methyladenosine
  modified_base 20: mod_base = OTHER; note = 2'-O-methyluridine
  modified_base 21: mod_base = OTHER; note = 2'-O-methylguanosine
  modified_base 22: mod_base = OTHER; note = 2'-O-methylcytidine
  modified_base 23: mod_base = OTHER; note = 2'-O-methyluridine
  modified_base 24: mod_base = OTHER; note = 2'-O-methyladenosine
  modified_base 25: mod_base = OTHER; note = 2'-O-methyladenosine
  modified_base 26: mod_base = OTHER; note = 2'-O-methyladenosine
  modified_base 27: mod_base = OTHER; note = 2'-O-methyluridine
  modified_base 28: mod_base = OTHER; note = 2'-O-methylguanosine
  modified_base 29: mod_base = OTHER; note = 2'-O-methyluridine
  modified_base 30: mod_base = OTHER; note = 2'-O-methyluridine
  modified_base 31: mod_base = OTHER; note = 2'-O-methylguanosine
  modified_base 32: mod_base = OTHER; note = 2'-O-methyluridine
  modified_base 33: mod_base = OTHER; note = 2'-O-methyluridine
  modified_base 34: mod_base = OTHER; note = 2'-O-methyladenosine
  modified_base 35: mod_base = OTHER; note = 2'-O-methyluridine
  modified_base 36: mod_base = OTHER; note = 2'-O-methyladenosine
  modified_base 37: mod_base = OTHER; note = 2'-O-methylguanosine
  modified_base 38: mod_base = OTHER; note = 2'-O-methyluridine
  modified_base 39: mod_base = OTHER; note = 2'-O-methyladenosine
  modified_base 40: mod_base = OTHER; note = 2'-O-methyluridine
  modified_base 41: mod_base = OTHER; note = 2'-O-methylcytidine
  modified_base 42: mod_base = OTHER; note = 2'-O-methylcytidine
  modified_base 43: mod_base = OTHER; note = 2'-O-methylcytidine
  modified_base 44: mod_base = OTHER; note = 2'-O-methyladenosine
  modified_base 45: mod_base = OTHER; note = 2'-O-methylcytidine
  modified_base 46: mod_base = OTHER; note = 2'-O-methylguanosine
  modified_base 47: mod_base = OTHER; note = 2'-O-methylcytidine
  modified_base 48: mod_base = OTHER; note = 2'-O-methyladenosine
  modified_base 49: mod_base = OTHER; note = 2'-O-methylcytidine
  modified_base 50: mod_base = OTHER; note = 2'-O-methyladenosine
  modified_base 51: mod_base = OTHER; note = 2'-O-methylguanosine
  modified_base 52: mod_base = OTHER; note = 2'-fluoroarabinoadenosine
  modified_base 55: mod_base = OTHER; note = 2'-O-methyladenosine
  modified_base 56: mod_base = OTHER; note = 2'-O-methylguanosine
  modified_base 57: mod_base = OTHER; note = 2'-O-methyladenosine
  modified_base 58: mod_base = OTHER; note = 2'-O-methyluridine
  modified_base 59: mod_base = OTHER; note = 2'-O-methyladenosine phosphorothioate
  modified_base 60: mod_base = OTHER; note = 2'-O-methylguanosine phosphorothioate
  modified_base 61: mod_base = OTHER; note = 2'-O-methyladenosine phosphorothioate
  modified_base 62: mod_base = OTHER; note = 2'-O-methyladenosine phosphorothioate
  modified_base 63: mod_base = OTHER; note = 2'-O-methylguanosine
  misc_feature 1..52: note = RNA
  misc_feature 53..54: note = DNA
  misc_feature 55..63: note = RNA

SEQ ID NO: 141 - DNA, 63 bp, synthetic construct; identical to SEQ ID NO: 83
  source 1..63: mol_type = other DNA; note = Description of Artificial Sequence: Synthetic oligonucleotide; note = Description of Combined DNA/RNA Molecule: Synthetic oligonucleotide
  modified_base 1: mod_base = OTHER; note = 2'-O-methylguanosine phosphorothioate
  modified_base 2: mod_base = OTHER; note = 2'-O-methyluridine phosphorothioate
  modified_base 3: mod_base = OTHER; note = 2'-O-methylguanosine phosphorothioate
  modified_base 4: mod_base = OTHER; note = 2'-O-methylguanosine phosphorothioate
  modified_base 5: mod_base = OTHER; note = 2'-O-methyladenosine
  modified_base 6: mod_base = OTHER; note = 2'-O-methyladenosine
  modified_base 7: mod_base = OTHER; note = 2'-O-methyluridine
  modified_base 8: mod_base = OTHER; note = 2'-O-methyladenosine
  modified_base 9: mod_base = OTHER; note = 2'-O-methylguanosine
  modified_base 10: mod_base = OTHER; note = 2'-O-methyluridine
  modified_base 11: mod_base = OTHER; note = 2'-O-methyladenosine
  modified_base 12: mod_base = OTHER; note = 2'-O-methyluridine
  modified_base 13: mod_base = OTHER; note = 2'-O-methyladenosine
  modified_base 14: mod_base = OTHER; note = 2'-O-methyladenosine
  modified_base 15: mod_base = OTHER; note = 2'-O-methylcytidine
  modified_base 16: mod_base = OTHER; note = 2'-O-methyladenosine
  modified_base 17: mod_base = OTHER; note = 2'-O-methyladenosine
  modified_base 18: mod_base = OTHER; note = 2'-O-methyluridine
  modified_base 19: mod_base = OTHER; note = 2'-O-methyladenosine
  modified_base 20: mod_base = OTHER; note = 2'-O-methyluridine
  modified_base 21: mod_base = OTHER; note = 2'-O-methylguanosine
  modified_base 22: mod_base = OTHER; note = 2'-O-methylcytidine
  modified_base 23: mod_base = OTHER; note = 2'-O-methyluridine
  modified_base 24: mod_base = OTHER; note = 2'-O-methyladenosine
  modified_base 25: mod_base = OTHER; note = 2'-O-methyladenosine
  modified_base 26: mod_base = OTHER; note = 2'-O-methyladenosine
  modified_base 27: mod_base = OTHER; note = 2'-O-methyluridine
  modified_base 28: mod_base = OTHER; note = 2'-O-methylguanosine
  modified_base 29: mod_base = OTHER; note = 2'-O-methyluridine
  modified_base 30: mod_base = OTHER; note = 2'-O-methyluridine
  modified_base 31: mod_base = OTHER; note = 2'-O-methylguanosine
  modified_base 32: mod_base = OTHER; note = 2'-O-methyluridine
  modified_base 33: mod_base = OTHER; note = 2'-O-methyluridine
  modified_base 34: mod_base = OTHER; note = 2'-O-methyladenosine
  modified_base 35: mod_base = OTHER; note = 2'-O-methyluridine
  modified_base 36: mod_base = OTHER; note = 2'-O-methyladenosine
  modified_base 37: mod_base = OTHER; note = 2'-O-methylguanosine
  modified_base 38: mod_base = OTHER; note = 2'-O-methyluridine
  modified_base 39: mod_base = OTHER; note = 2'-O-methyladenosine
  modified_base 40: mod_base = OTHER; note = 2'-O-methyluridine
  modified_base 41: mod_base = OTHER; note = 2'-O-methylcytidine
  modified_base 42: mod_base = OTHER; note = 2'-O-methylcytidine
  modified_base 43: mod_base = OTHER; note = 2'-O-methylcytidine
  modified_base 44: mod_base = OTHER; note = 2'-O-methyladenosine
  modified_base 45: mod_base = OTHER; note = 2'-O-methylcytidine
  modified_base 46: mod_base = OTHER; note = 2'-O-methylguanosine
  modified_base 47: mod_base = OTHER; note = 2'-O-methylcytidine
  modified_base 48: mod_base = OTHER; note = 2'-O-methyladenosine
  modified_base 49: mod_base = OTHER; note = 2'-O-methylcytidine
  modified_base 50: mod_base = OTHER; note = 2'-O-methyladenosine
  modified_base 51: mod_base = OTHER; note = 2'-O-methylguanosine
  modified_base 53: mod_base = OTHER; note = 2'-fluoroarabinocytidine
  modified_base 55: mod_base = OTHER; note = 2'-O-methyladenosine
  modified_base 56: mod_base = OTHER; note = 2'-O-methylguanosine
  modified_base 57: mod_base = OTHER; note = 2'-O-methyladenosine
  modified_base 58: mod_base = OTHER; note = 2'-O-methyluridine
  modified_base 59: mod_base = OTHER; note = 2'-O-methyladenosine phosphorothioate
  modified_base 60: mod_base = OTHER; note = 2'-O-methylguanosine phosphorothioate
  modified_base 61: mod_base = OTHER; note = 2'-O-methyladenosine phosphorothioate
  modified_base 62: mod_base = OTHER; note = 2'-O-methyladenosine phosphorothioate
  modified_base 63: mod_base = OTHER; note = 2'-O-methylguanosine
  misc_feature 1..51: note = RNA
  misc_feature 52: note = DNA
  misc_feature 53: note = RNA
  misc_feature 54: note = DNA
  misc_feature 55..63: note = RNA

SEQ ID NO: 142 - DNA, 63 bp, synthetic construct; identical to SEQ ID NO: 83
  source 1..63: mol_type = other DNA; note = Description of Artificial Sequence: Synthetic oligonucleotide; note = Description of Combined DNA/RNA Molecule: Synthetic oligonucleotide
  modified_base 1: mod_base = OTHER; note = 2'-O-methylguanosine phosphorothioate
  modified_base 2: mod_base = OTHER; note = 2'-O-methyluridine phosphorothioate
  modified_base 3: mod_base = OTHER; note = 2'-O-methylguanosine phosphorothioate
  modified_base 4: mod_base = OTHER; note = 2'-O-methylguanosine phosphorothioate
  modified_base 5: mod_base = OTHER; note = 2'-O-methyladenosine
  modified_base 6: mod_base = OTHER; note = 2'-O-methyladenosine
  modified_base 7: mod_base = OTHER; note = 2'-O-methyluridine
  modified_base 8: mod_base = OTHER; note = 2'-O-methyladenosine
  modified_base 9: mod_base = OTHER; note = 2'-O-methylguanosine
  modified_base 10: mod_base = OTHER; note = 2'-O-methyluridine
  modified_base 11: mod_base = OTHER; note = 2'-O-methyladenosine
  modified_base 12: mod_base = OTHER; note = 2'-O-methyluridine
  modified_base 13: mod_base = OTHER; note = 2'-O-methyladenosine
  modified_base 14: mod_base = OTHER; note = 2'-O-methyladenosine
  modified_base 15: mod_base = OTHER; note = 2'-O-methylcytidine
  modified_base 16: mod_base = OTHER; note = 2'-O-methyladenosine
  modified_base 17: mod_base = OTHER; note = 2'-O-methyladenosine
  modified_base 18: mod_base = OTHER; note = 2'-O-methyluridine
  modified_base 19: mod_base = OTHER; note = 2'-O-methyladenosine
  modified_base 20: mod_base = OTHER; note = 2'-O-methyluridine
  modified_base 21: mod_base = OTHER; note = 2'-O-methylguanosine
  modified_base 22: mod_base = OTHER; note = 2'-O-methylcytidine
  modified_base 23: mod_base = OTHER; note = 2'-O-methyluridine
  modified_base 24: mod_base = OTHER; note = 2'-O-methyladenosine
  modified_base 25: mod_base = OTHER; note = 2'-O-methyladenosine
  modified_base 26: mod_base = OTHER; note = 2'-O-methyladenosine
  modified_base 27: mod_base = OTHER; note = 2'-O-methyluridine
  modified_base 28: mod_base = OTHER; note = 2'-O-methylguanosine
  modified_base 29: mod_base = OTHER; note = 2'-O-methyluridine
  modified_base 30: mod_base = OTHER; note = 2'-O-methyluridine
  modified_base 31: mod_base = OTHER; note = 2'-O-methylguanosine
  modified_base 32: mod_base = OTHER; note = 2'-O-methyluridine
  modified_base 33: mod_base = OTHER; note = 2'-O-methyluridine
  modified_base 34: mod_base = OTHER; note = 2'-O-methyladenosine
  modified_base 35: mod_base = OTHER; note = 2'-O-methyluridine
  modified_base 36: mod_base = OTHER; note = 2'-O-methyladenosine
  modified_base 37: mod_base = OTHER; note = 2'-O-methylguanosine
  modified_base 38: mod_base = OTHER; note = 2'-O-methyluridine
  modified_base 39: mod_base = OTHER; note = 2'-O-methyladenosine
  modified_base 40: mod_base = OTHER; note = 2'-O-methyluridine
  modified_base 41: mod_base = OTHER; note = 2'-O-methylcytidine
  modified_base 42: mod_base = OTHER; note = 2'-O-methylcytidine
  modified_base 43: mod_base = OTHER; note = 2'-O-methylcytidine
  modified_base 44: mod_base = OTHER; note = 2'-O-methyladenosine
  modified_base 45: mod_base = OTHER; note = 2'-O-methylcytidine
  modified_base 46: mod_base = OTHER; note = 2'-O-methylguanosine
  modified_base 47: mod_base = OTHER; note = 2'-O-methylcytidine
  modified_base 48: mod_base = OTHER; note = 2'-O-methyladenosine
  modified_base 49: mod_base = OTHER; note = 2'-O-methylcytidine
  modified_base 50: mod_base = OTHER; note = 2'-O-methyladenosine
  modified_base 51: mod_base = OTHER; note = 2'-O-methylguanosine
  modified_base 54: mod_base = OTHER; note = 2'-fluoroarabinocytidine
  modified_base 55: mod_base = OTHER; note = 2'-O-methyladenosine
  modified_base 56: mod_base = OTHER; note = 2'-O-methylguanosine
  modified_base 57: mod_base = OTHER; note = 2'-O-methyladenosine
  modified_base 58: mod_base = OTHER; note = 2'-O-methyluridine
  modified_base 59: mod_base = OTHER; note = 2'-O-methyladenosine phosphorothioate
  modified_base 60: mod_base = OTHER; note = 2'-O-methylguanosine phosphorothioate
  modified_base 61: mod_base = OTHER; note = 2'-O-methyladenosine phosphorothioate
  modified_base 62: mod_base = OTHER; note = 2'-O-methyladenosine phosphorothioate
  modified_base 63: mod_base = OTHER; note = 2'-O-methylguanosine
  misc_feature 1..51: note = RNA
  misc_feature 52..53: note = DNA
  misc_feature 54..63: note = RNA

SEQ ID NO: 143 - DNA, 63 bp, synthetic construct; identical to SEQ ID NO: 83
  source 1..63: mol_type = other DNA; note = Description of Artificial Sequence: Synthetic oligonucleotide; note = Description of Combined DNA/RNA Molecule: Synthetic oligonucleotide
  modified_base 1: mod_base = OTHER; note = 2'-O-methylguanosine phosphorothioate
  modified_base 2: mod_base = OTHER; note = 2'-O-methyluridine phosphorothioate
  modified_base 3: mod_base = OTHER; note = 2'-O-methylguanosine phosphorothioate
  modified_base 4: mod_base = OTHER; note = 2'-O-methylguanosine phosphorothioate
  modified_base 5: mod_base = OTHER; note = 2'-O-methyladenosine
  modified_base 6: mod_base = OTHER; note = 2'-O-methyladenosine
  modified_base 7: mod_base = OTHER; note = 2'-O-methyluridine
  modified_base 8: mod_base = OTHER; note = 2'-O-methyladenosine
  modified_base 9: mod_base = OTHER; note = 2'-O-methylguanosine
  modified_base 10: mod_base = OTHER; note = 2'-O-methyluridine
  modified_base 11: mod_base = OTHER; note = 2'-O-methyladenosine
  modified_base 12: mod_base = OTHER; note = 2'-O-methyluridine
  modified_base 13: mod_base = OTHER; note = 2'-O-methyladenosine
  modified_base 14: mod_base = OTHER; note = 2'-O-methyladenosine
  modified_base 15: mod_base = OTHER; note = 2'-O-methylcytidine
  modified_base 16: mod_base = OTHER; note = 2'-O-methyladenosine
  modified_base 17: mod_base = OTHER; note = 2'-O-methyladenosine
  modified_base 18: mod_base = OTHER; note = 2'-O-methyluridine
  modified_base 19: mod_base = OTHER; note = 2'-O-methyladenosine
  modified_base 20: mod_base = OTHER; note = 2'-O-methyluridine
  modified_base 21: mod_base = OTHER; note = 2'-O-methylguanosine
  modified_base 22: mod_base = OTHER; note = 2'-O-methylcytidine
  modified_base 23: mod_base = OTHER; note = 2'-O-methyluridine
  modified_base 24: mod_base = OTHER; note = 2'-O-methyladenosine
  modified_base 25: mod_base = OTHER; note = 2'-O-methyladenosine
  modified_base 26: mod_base = OTHER; note = 2'-O-methyladenosine
  modified_base 27: mod_base = OTHER; note = 2'-O-methyluridine
  modified_base 28: mod_base = OTHER; note = 2'-O-methylguanosine
  modified_base 29: mod_base = OTHER; note = 2'-O-methyluridine
  modified_base 30: mod_base = OTHER; note = 2'-O-methyluridine
  modified_base 31: mod_base = OTHER; note = 2'-O-methylguanosine
  modified_base 32: mod_base = OTHER; note = 2'-O-methyluridine
  modified_base 33: mod_base = OTHER; note = 2'-O-methyluridine
  modified_base 34: mod_base = OTHER; note = 2'-O-methyladenosine
  modified_base 35: mod_base = OTHER; note = 2'-O-methyluridine
  modified_base 36: mod_base = OTHER; note = 2'-O-methyladenosine
  modified_base 37: mod_base = OTHER; note = 2'-O-methylguanosine
  modified_base 38: mod_base = OTHER; note = 2'-O-methyluridine
  modified_base 39: mod_base = OTHER; note = 2'-O-methyladenosine
  modified_base 40: mod_base = OTHER; note = 2'-O-methyluridine
  modified_base 41: mod_base = OTHER; note = 2'-O-methylcytidine
  modified_base 42: mod_base = OTHER; note = 2'-O-methylcytidine
  modified_base 43: mod_base = OTHER; note = 2'-O-methylcytidine
  modified_base 44: mod_base = OTHER; note = 2'-O-methyladenosine
  modified_base 45: mod_base = OTHER; note = 2'-O-methylcytidine
  modified_base 46: mod_base = OTHER; note = 2'-O-methylguanosine
  modified_base 47: mod_base = OTHER; note = 2'-O-methylcytidine
  modified_base 48: mod_base = OTHER; note = 2'-O-methyladenosine
  modified_base 49: mod_base = OTHER; note = 2'-O-methylcytidine
  modified_base 50: mod_base = OTHER; note = 2'-O-methyladenosine
  modified_base 51: mod_base = OTHER; note = 2'-O-methylguanosine
  modified_base 53: mod_base = OTHER; note = 2'-fluoroarabinocytidine
  modified_base 54: mod_base = OTHER; note = 2'-fluoroarabinocytidine
  modified_base 55: mod_base = OTHER; note = 2'-O-methyladenosine
  modified_base 56: mod_base = OTHER; note = 2'-O-methylguanosine
  modified_base 57: mod_base = OTHER; note = 2'-O-methyladenosine
  modified_base 58: mod_base = OTHER; note = 2'-O-methyluridine
  modified_base 59: mod_base = OTHER; note = 2'-O-methyladenosine phosphorothioate
  modified_base 60: mod_base = OTHER; note = 2'-O-methylguanosine phosphorothioate
  modified_base 61: mod_base = OTHER; note = 2'-O-methyladenosine phosphorothioate
  modified_base 62: mod_base = OTHER; note = 2'-O-methyladenosine phosphorothioate
  modified_base 63: mod_base = OTHER; note = 2'-O-methylguanosine
  misc_feature 1..51: note = RNA
  misc_feature 52: note = DNA
  misc_feature 53..63: note = RNA

SEQ ID NO: 144 - DNA, 63 bp, synthetic construct; identical to SEQ ID NO: 83
  source 1..63: mol_type = other DNA; note = Description of Artificial Sequence: Synthetic oligonucleotide; note = Description of Combined DNA/RNA Molecule: Synthetic oligonucleotide
  modified_base 1: mod_base = OTHER; note = 2'-O-methylguanosine phosphorothioate
  modified_base 2: mod_base = OTHER; note = 2'-O-methyluridine phosphorothioate
  modified_base 3: mod_base = OTHER; note = 2'-O-methylguanosine phosphorothioate
  modified_base 4: mod_base = OTHER; note = 2'-O-methylguanosine phosphorothioate
  modified_base 5: mod_base = OTHER; note = 2'-O-methyladenosine
  modified_base 6: mod_base = OTHER; note = 2'-O-methyladenosine
  modified_base 7: mod_base = OTHER; note = 2'-O-methyluridine
  modified_base 8: mod_base = OTHER; note = 2'-O-methyladenosine
  modified_base 9: mod_base = OTHER; note = 2'-O-methylguanosine
  modified_base 10: mod_base = OTHER; note = 2'-O-methyluridine
  modified_base 11: mod_base = OTHER; note = 2'-O-methyladenosine
  modified_base 12: mod_base = OTHER; note = 2'-O-methyluridine
  modified_base 13: mod_base = OTHER; note = 2'-O-methyladenosine
  modified_base 14: mod_base = OTHER; note = 2'-O-methyladenosine
  modified_base 15: mod_base = OTHER; note = 2'-O-methylcytidine
  modified_base 16: mod_base = OTHER; note = 2'-O-methyladenosine
  modified_base 17: mod_base = OTHER; note = 2'-O-methyladenosine
  modified_base 18: mod_base = OTHER; note = 2'-O-methyluridine
  modified_base 19: mod_base = OTHER; note = 2'-O-methyladenosine
  modified_base 20: mod_base = OTHER; note = 2'-O-methyluridine
  modified_base 21: mod_base = OTHER; note = 2'-O-methylguanosine
  modified_base 22: mod_base = OTHER; note = 2'-O-methylcytidine
  modified_base 23: mod_base = OTHER; note = 2'-O-methyluridine
  modified_base 24: mod_base = OTHER; note = 2'-O-methyladenosine
  modified_base 25: mod_base = OTHER; note = 2'-O-methyladenosine
  modified_base 26: mod_base = OTHER; note = 2'-O-methyladenosine
  modified_base 27: mod_base = OTHER; note = 2'-O-methyluridine
  modified_base 28: mod_base = OTHER; note = 2'-O-methylguanosine
  modified_base 29: mod_base = OTHER; note = 2'-O-methyluridine
  modified_base 30: mod_base = OTHER; note = 2'-O-methyluridine
  modified_base 31: mod_base = OTHER; note = 2'-O-methylguanosine
  modified_base 32: mod_base = OTHER; note = 2'-O-methyluridine
  modified_base 33: mod_base = OTHER; note = 2'-O-methyluridine
  modified_base 34: mod_base = OTHER; note = 2'-O-methyladenosine
  modified_base 35: mod_base = OTHER; note = 2'-O-methyluridine
  modified_base 36: mod_base = OTHER; note = 2'-O-methyladenosine
  modified_base 37: mod_base = OTHER; note = 2'-O-methylguanosine
  modified_base 38: mod_base = OTHER; note = 2'-O-methyluridine
  modified_base 39: mod_base = OTHER; note = 2'-O-methyladenosine
  modified_base 40: mod_base = OTHER; note = 2'-O-methyluridine
  modified_base 41: mod_base = OTHER; note = 2'-O-methylcytidine
  modified_base 42: mod_base = OTHER; note = 2'-O-methylcytidine
  modified_base 43: mod_base = OTHER; note = 2'-O-methylcytidine
  modified_base 44: mod_base = OTHER; note = 2'-O-methyladenosine
  modified_base 45: mod_base = OTHER; note = 2'-O-methylcytidine
  modified_base 46: mod_base = OTHER; note = 2'-O-methylguanosine
  modified_base 47: mod_base = OTHER; note = 2'-O-methylcytidine
  modified_base 48: mod_base = OTHER; note = 2'-O-methyladenosine
  modified_base 49: mod_base = OTHER; note = 2'-O-methylcytidine
  modified_base 50: mod_base = OTHER; note = 2'-O-methyladenosine
  modified_base 51: mod_base = OTHER; note = 2'-O-methylguanosine
  modified_base 52: mod_base = OTHER; note = 2'-fluoroarabinoadenosine
  modified_base 53: mod_base = OTHER; note = 2'-fluoroarabinocytidine
  modified_base 55: mod_base = OTHER; note = 2'-O-methyladenosine
  modified_base 56: mod_base = OTHER; note = 2'-O-methylguanosine
  modified_base 57: mod_base = OTHER; note = 2'-O-methyladenosine
  modified_base 58: mod_base = OTHER; note = 2'-O-methyluridine
  modified_base 59: mod_base = OTHER; note = 2'-O-methyladenosine phosphorothioate
  modified_base 60: mod_base = OTHER; note = 2'-O-methylguanosine phosphorothioate
  modified_base 61: mod_base = OTHER; note = 2'-O-methyladenosine phosphorothioate
  modified_base 62: mod_base = OTHER; note = 2'-O-methyladenosine phosphorothioate
  modified_base 63: mod_base = OTHER; note = 2'-O-methylguanosine
  misc_feature 1..53: note = RNA
  misc_feature 54: note = DNA
  misc_feature 55..63: note = RNA

SEQ ID NO: 145 - RNA, 63 nt, synthetic construct
  source 1..63: mol_type = other RNA; note = Description of Artificial Sequence: Synthetic oligonucleotide
  modified_base 1: mod_base = OTHER; note = 2'-O-methylguanosine phosphorothioate
  modified_base 2: mod_base = OTHER; note = 2'-O-methyluridine phosphorothioate
  modified_base 3: mod_base = OTHER; note = 2'-O-methylguanosine phosphorothioate
  modified_base 4: mod_base = OTHER; note = 2'-O-methylguanosine phosphorothioate
  modified_base 5: mod_base = OTHER; note = 2'-O-methyladenosine
  modified_base 6: mod_base = OTHER; note = 2'-O-methyladenosine
  modified_base 7: mod_base = OTHER; note = 2'-O-methyluridine
  modified_base 8: mod_base = OTHER; note = 2'-O-methyladenosine
  modified_base 9: mod_base = OTHER; note = 2'-O-methylguanosine
  modified_base 10: mod_base = OTHER; note = 2'-O-methyluridine
  modified_base 11: mod_base = OTHER; note = 2'-O-methyladenosine
  modified_base 12: mod_base = OTHER; note = 2'-O-methyluridine
  modified_base 13: mod_base = OTHER; note = 2'-O-methyladenosine
  modified_base 14: mod_base = OTHER; note = 2'-O-methyladenosine
  modified_base 15: mod_base = OTHER; note = 2'-O-methylcytidine
  modified_base 16: mod_base = OTHER; note = 2'-O-methyladenosine
  modified_base 17: mod_base = OTHER; note = 2'-O-methyladenosine
  modified_base 18: mod_base = OTHER; note = 2'-O-methyluridine
  modified_base 19: mod_base = OTHER; note = 2'-O-methyladenosine
  modified_base 20: mod_base = OTHER; note = 2'-O-methyluridine
  modified_base 21: mod_base = OTHER; note = 2'-O-methylguanosine
  modified_base 22: mod_base = OTHER; note = 2'-O-methylcytidine
  modified_base 23: mod_base = OTHER; note = 2'-O-methyluridine
  modified_base 24: mod_base = OTHER; note = 2'-O-methyladenosine
  modified_base 25: mod_base = OTHER; note = 2'-O-methyladenosine
  modified_base 26: mod_base = OTHER; note = 2'-O-methyladenosine
  modified_base 27: mod_base = OTHER; note = 2'-O-methyluridine
  modified_base 28: mod_base = OTHER; note = 2'-O-methylguanosine
  modified_base 29: mod_base = OTHER; note = 2'-O-methyluridine
  modified_base 30: mod_base = OTHER; note = 2'-O-methyluridine
  modified_base 31: mod_base = OTHER; note = 2'-O-methylguanosine
  modified_base 32: mod_base = OTHER; note = 2'-O-methyluridine
  modified_base 33: mod_base = OTHER; note = 2'-O-methyluridine
  modified_base 34: mod_base = OTHER; note = 2'-O-methyladenosine
  modified_base 35: mod_base = OTHER; note = 2'-O-methyluridine
  modified_base 36: mod_base = OTHER; note = 2'-O-methyladenosine
  modified_base 37: mod_base = OTHER; note = 2'-O-methylguanosine
  modified_base 38: mod_base = OTHER; note = 2'-O-methyluridine
  modified_base 39: mod_base = OTHER; note = 2'-O-methyladenosine
  modified_base 40: mod_base = OTHER; note = 2'-O-methyluridine
  modified_base 41: mod_base = OTHER; note = 2'-O-methylcytidine
  modified_base 42: mod_base = OTHER; note = 2'-O-methylcytidine
  modified_base 43: mod_base = OTHER; note = 2'-O-methylcytidine
  modified_base 44: mod_base = OTHER; note = 2'-O-methyladenosine
  modified_base 45: mod_base = OTHER; note = 2'-O-methylcytidine
  modified_base 46: mod_base = OTHER; note = 2'-O-methylguanosine
  modified_base 47: mod_base = OTHER; note = 2'-O-methylcytidine
  modified_base 48: mod_base = OTHER; note = 2'-O-methyladenosine
  modified_base 49: mod_base = OTHER; note = 2'-O-methylcytidine
  modified_base 50: mod_base = OTHER; note = 2'-O-methyladenosine
  modified_base 51: mod_base = OTHER; note = 2'-O-methylguanosine
  modified_base 52: mod_base = OTHER; note = 2'-fluoroarabinoadenosine
  modified_base 53: mod_base = OTHER; note = 2'-fluoroarabinocytidine
  modified_base 54: mod_base = OTHER; note = 2'-fluoroarabinocytidine
  modified_base 55: mod_base = OTHER; note = 2'-O-methyladenosine
  modified_base 56: mod_base = OTHER; note = 2'-O-methylguanosine
  modified_base 57: mod_base = OTHER; note = 2'-O-methyladenosine
  modified_base 58: mod_base = OTHER; note = 2'-O-methyluridine
  modified_base 59: mod_base = OTHER; note = 2'-O-methyladenosine phosphorothioate
  modified_base 60: mod_base = OTHER; note = 2'-O-methylguanosine phosphorothioate
  modified_base 61: mod_base = OTHER; note = 2'-O-methyladenosine phosphorothioate
  modified_base 62: mod_base = OTHER; note = 2'-O-methyladenosine phosphorothioate
  modified_base 63: mod_base = OTHER; note = 2'-O-methylguanosine
gtggaatagtataacaatatgctaaatgttgttatagtatcccacgcacagaccagatagaag

SEQ ID NO: 146 - DNA, 63 bp, synthetic construct; identical to SEQ ID NO: 83
  source 1..63: mol_type = other DNA; note = Description of Artificial Sequence: Synthetic oligonucleotide; note = Description of Combined DNA/RNA Molecule: Synthetic oligonucleotide
  modified_base 1: mod_base = OTHER; note = 2'-O-methylguanosine phosphorothioate
  modified_base 2: mod_base = OTHER; note = 2'-O-methyluridine phosphorothioate
  modified_base 3: mod_base = OTHER; note = 2'-O-methylguanosine phosphorothioate
  modified_base 4: mod_base = OTHER; note = 2'-O-methylguanosine phosphorothioate
  modified_base 5: mod_base = OTHER; note = 2'-O-methyladenosine
  modified_base 6: mod_base = OTHER; note = 2'-O-methyladenosine
  modified_base 7: mod_base = OTHER; note = 2'-O-methyluridine
  modified_base 8: mod_base = OTHER; note = 2'-O-methyladenosine
  modified_base 9: mod_base = OTHER; note = 2'-O-methylguanosine
  modified_base 10: mod_base = OTHER; note = 2'-O-methyluridine
  modified_base 11: mod_base = OTHER; note = 2'-O-methyladenosine
  modified_base 12: mod_base = OTHER; note = 2'-O-methyluridine
  modified_base 13: mod_base = OTHER; note = 2'-O-methyladenosine
  modified_base 14: mod_base = OTHER; note = 2'-O-methyladenosine
  modified_base 15: mod_base = OTHER; note = 2'-O-methylcytidine
  modified_base 16: mod_base = OTHER; note = 2'-O-methyladenosine
  modified_base 17: mod_base = OTHER; note = 2'-O-methyladenosine
  modified_base 18: mod_base = OTHER; note = 2'-O-methyluridine
  modified_base 19: mod_base = OTHER; note = 2'-O-methyladenosine
  modified_base 20: mod_base = OTHER; note = 2'-O-methyluridine
  modified_base 21: mod_base = OTHER; note = 2'-O-methylguanosine
  modified_base 22: mod_base = OTHER; note = 2'-O-methylcytidine
  modified_base 23: mod_base = OTHER; note = 2'-O-methyluridine
  modified_base 24: mod_base = OTHER; note = 2'-O-methyladenosine
  modified_base 25: mod_base = OTHER; note = 2'-O-methyladenosine
  modified_base 26: mod_base = OTHER; note = 2'-O-methyladenosine
  modified_base 27: mod_base = OTHER; note = 2'-O-methyluridine
  modified_base 28: mod_base = OTHER; note = 2'-O-methylguanosine
  modified_base 29: mod_base = OTHER; note = 2'-O-methyluridine
  modified_base 30: mod_base = OTHER; note = 2'-O-methyluridine
  modified_base 31: mod_base = OTHER; note = 2'-O-methylguanosine
  modified_base 32: mod_base = OTHER; note = 2'-O-methyluridine
  modified_base 33: mod_base = OTHER; note = 2'-O-methyluridine
  modified_base 34: mod_base = OTHER; note = 2'-O-methyladenosine
  modified_base 35: mod_base = OTHER; note = 2'-O-methyluridine
  modified_base 36: mod_base = OTHER; note = 2'-O-methyladenosine
  modified_base 37: mod_base = OTHER; note = 2'-O-methylguanosine
  modified_base 38: mod_base = OTHER; note = 2'-O-methyluridine
  modified_base 39: mod_base = OTHER; note = 2'-O-methyladenosine
  modified_base 40: mod_base = OTHER; note = 2'-O-methyluridine
  modified_base 41: mod_base = OTHER; note = 2'-O-methylcytidine
  modified_base 42: mod_base = OTHER; note = 2'-O-methylcytidine
  modified_base 43: mod_base = OTHER; note = 2'-O-methylcytidine
  modified_base 44: mod_base = OTHER; note = 2'-O-methyladenosine
  modified_base 45: mod_base = OTHER; note = 2'-O-methylcytidine
  modified_base 46: mod_base = OTHER; note = 2'-O-methylguanosine
  modified_base 47: mod_base = OTHER; note = 2'-O-methylcytidine
  modified_base 48: mod_base = OTHER; note = 2'-O-methyladenosine
  modified_base 49: mod_base = OTHER; note = 2'-O-methylcytidine
  modified_base 50: mod_base = OTHER; note = 2'-O-methyladenosine
  modified_base 51: mod_base = OTHER; note = 2'-O-methylguanosine
  modified_base 52: mod_base = OTHER; note = Arabinoadenosine
  modified_base 55: mod_base = OTHER; note = 2'-O-methyladenosine
  modified_base 56: mod_base = OTHER; note = 2'-O-methylguanosine
  modified_base 57: mod_base = OTHER; note = 2'-O-methyladenosine
  modified_base 58: mod_base = OTHER; note = 2'-O-methyluridine
  modified_base 59: mod_base = OTHER; note = 2'-O-methyladenosine phosphorothioate
  modified_base 60: mod_base = OTHER; note = 2'-O-methylguanosine phosphorothioate
  modified_base 61: mod_base = OTHER; note = 2'-O-methyladenosine phosphorothioate
  modified_base 62: mod_base = OTHER; note = 2'-O-methyladenosine phosphorothioate
  modified_base 63: mod_base = OTHER; note = 2'-O-methylguanosine
  misc_feature 1..52: note = RNA
  misc_feature 53..54: note = DNA
  misc_feature 55..63: note = RNA

SEQ ID NO: 147 - DNA, 63 bp, synthetic construct; identical to SEQ ID NO: 83
  source 1..63: mol_type = other DNA; note = Description of Artificial Sequence: Synthetic oligonucleotide; note = Description of Combined DNA/RNA Molecule: Synthetic oligonucleotide
  modified_base 1: mod_base = OTHER; note = 2'-O-methylguanosine phosphorothioate
  modified_base 2: mod_base = OTHER; note = 2'-O-methyluridine phosphorothioate
  modified_base 3: mod_base = OTHER; note = 2'-O-methylguanosine phosphorothioate
  modified_base 4: mod_base = OTHER; note = 2'-O-methylguanosine phosphorothioate
  modified_base 5: mod_base = OTHER; note = 2'-O-methyladenosine
  modified_base 6: mod_base = OTHER; note = 2'-O-methyladenosine
  modified_base 7: mod_base = OTHER; note = 2'-O-methyluridine
  modified_base 8: mod_base = OTHER; note = 2'-O-methyladenosine
  modified_base 9: mod_base = OTHER; note = 2'-O-methylguanosine
  modified_base 10: mod_base = OTHER; note = 2'-O-methyluridine
  modified_base 11: mod_base = OTHER; note = 2'-O-methyladenosine
  modified_base 12: mod_base = OTHER; note = 2'-O-methyluridine
  modified_base 13: mod_base = OTHER; note = 2'-O-methyladenosine
  modified_base 14: mod_base = OTHER; note = 2'-O-methyladenosine
  modified_base 15: mod_base = OTHER; note = 2'-O-methylcytidine
  modified_base 16: mod_base = OTHER; note = 2'-O-methyladenosine
  modified_base 17: mod_base = OTHER; note = 2'-O-methyladenosine
  modified_base 18: mod_base = OTHER; note = 2'-O-methyluridine
  modified_base 19: mod_base = OTHER; note = 2'-O-methyladenosine
  modified_base 20: mod_base = OTHER; note = 2'-O-methyluridine
  modified_base 21: mod_base = OTHER; note = 2'-O-methylguanosine
  modified_base 22: mod_base = OTHER; note = 2'-O-methylcytidine
  modified_base 23: mod_base = OTHER; note = 2'-O-methyluridine
  modified_base 24: mod_base = OTHER; note = 2'-O-methyladenosine
  modified_base 25: mod_base = OTHER; note = 2'-O-methyladenosine
  modified_base 26: mod_base = OTHER; note = 2'-O-methyladenosine
  modified_base 27: mod_base = OTHER; note = 2'-O-methyluridine
  modified_base 28: mod_base = OTHER; note = 2'-O-methylguanosine
  modified_base 29: mod_base = OTHER; note = 2'-O-methyluridine
  modified_base 30: mod_base = OTHER; note = 2'-O-methyluridine
  modified_base 31: mod_base = OTHER; note = 2'-O-methylguanosine
  modified_base 32: mod_base = OTHER; note = 2'-O-methyluridine
  modified_base 33: mod_base = OTHER; note = 2'-O-methyluridine
  modified_base 34: mod_base = OTHER; note = 2'-O-methyladenosine
  modified_base 35: mod_base = OTHER; note = 2'-O-methyluridine
  modified_base 36: mod_base = OTHER; note = 2'-O-methyladenosine
  modified_base 37: mod_base = OTHER; note = 2'-O-methylguanosine
  modified_base 38: mod_base = OTHER; note = 2'-O-methyluridine
  modified_base 39: mod_base = OTHER; note = 2'-O-methyladenosine
  modified_base 40: mod_base = OTHER; note = 2'-O-methyluridine
  modified_base 41: mod_base = OTHER; note = 2'-O-methylcytidine
  modified_base 42: mod_base = OTHER; note = 2'-O-methylcytidine
  modified_base 43: mod_base = OTHER; note = 2'-O-methylcytidine
  modified_base 44: mod_base = OTHER; note = 2'-O-methyladenosine
  modified_base 45: mod_base = OTHER; note = 2'-O-methylcytidine
  modified_base 46: mod_base = OTHER; note = 2'-O-methylguanosine
  modified_base 47: mod_base = OTHER; note = 2'-O-methylcytidine
  modified_base 48: mod_base = OTHER; note = 2'-O-methyladenosine
  modified_base 49: mod_base = OTHER; note = 2'-O-methylcytidine
  modified_base 50: mod_base = OTHER; note = 2'-O-methyladenosine
  modified_base 51: mod_base = OTHER; note = 2'-O-methylguanosine
  modified_base 53: mod_base = OTHER; note = Arabinocytidine
  modified_base 55: mod_base = OTHER; note = 2'-O-methyladenosine
  modified_base 56: mod_base = OTHER; note = 2'-O-methylguanosine
  modified_base 57: mod_base = OTHER; note = 2'-O-methyladenosine
  modified_base 58: mod_base = OTHER; note = 2'-O-methyluridine
  modified_base 59: mod_base = OTHER; note = 2'-O-methyladenosine phosphorothioate
  modified_base 60: mod_base = OTHER; note = 2'-O-methylguanosine phosphorothioate
  modified_base 61: mod_base = OTHER; note = 2'-O-methyladenosine phosphorothioate
  modified_base 62: mod_base = OTHER; note = 2'-O-methyladenosine phosphorothioate
  modified_base 63: mod_base = OTHER; note = 2'-O-methylguanosine
  misc_feature 1..51: note = RNA
  misc_feature 52: note = DNA
  misc_feature 53: note = RNA
  misc_feature 54: note = DNA
  misc_feature 55..63: note = RNA

SEQ ID NO: 148 - DNA, 63 bp, synthetic construct; identical to SEQ ID NO: 83
  source 1..63: mol_type = other DNA; note = Description of Artificial Sequence: Synthetic oligonucleotide; note = Description of Combined DNA/RNA Molecule: Synthetic oligonucleotide
  modified_base 1: mod_base = OTHER; note = 2'-O-methylguanosine phosphorothioate
  modified_base 2: mod_base = OTHER; note = 2'-O-methyluridine phosphorothioate
  modified_base 3: mod_base = OTHER; note = 2'-O-methylguanosine phosphorothioate
  modified_base 4: mod_base = OTHER; note = 2'-O-methylguanosine phosphorothioate
  modified_base 5: mod_base = OTHER; note = 2'-O-methyladenosine
  modified_base 6: mod_base = OTHER; note = 2'-O-methyladenosine
  modified_base 7: mod_base = OTHER; note = 2'-O-methyluridine
  modified_base 8: mod_base = OTHER; note = 2'-O-methyladenosine
  modified_base 9: mod_base = OTHER; note = 2'-O-methylguanosine
  modified_base 10: mod_base = OTHER; note = 2'-O-methyluridine
  modified_base 11: mod_base = OTHER; note = 2'-O-methyladenosine
  modified_base 12: mod_base = OTHER; note = 2'-O-methyluridine
  modified_base 13: mod_base = OTHER; note = 2'-O-methyladenosine
  modified_base 14: mod_base = OTHER; note = 2'-O-methyladenosine
  modified_base 15: mod_base = OTHER; note = 2'-O-methylcytidine
  modified_base 16: mod_base = OTHER; note = 2'-O-methyladenosine
  modified_base 17: mod_base = OTHER; note = 2'-O-methyladenosine
  modified_base 18: mod_base = OTHER; note = 2'-O-methyluridine
  modified_base 19: mod_base = OTHER; note = 2'-O-methyladenosine
  modified_base 20: mod_base = OTHER; note = 2'-O-methyluridine
  modified_base 21: mod_base = OTHER; note = 2'-O-methylguanosine
  modified_base 22: mod_base = OTHER; note = 2'-O-methylcytidine
  modified_base 23: mod_base = OTHER; note = 2'-O-methyluridine
  modified_base 24: mod_base = OTHER; note = 2'-O-methyladenosine
  modified_base 25: mod_base = OTHER; note = 2'-O-methyladenosine
  modified_base 26: mod_base = OTHER; note = 2'-O-methyladenosine
  modified_base 27: mod_base = OTHER; note = 2'-O-methyluridine
  modified_base 28: mod_base = OTHER; note = 2'-O-methylguanosine
  modified_base 29: mod_base = OTHER; note = 2'-O-methyluridine
  modified_base 30: mod_base = OTHER; note = 2'-O-methyluridine
  modified_base 31: mod_base = OTHER; note = 2'-O-methylguanosine
  modified_base 32: mod_base = OTHER; note = 2'-O-methyluridine
  modified_base 33: mod_base = OTHER; note = 2'-O-methyluridine
  modified_base 34: mod_base = OTHER; note = 2'-O-methyladenosine
  modified_base 35: mod_base = OTHER; note = 2'-O-methyluridine
  modified_base 36: mod_base = OTHER; note = 2'-O-methyladenosine
  modified_base 37: mod_base = OTHER; note = 2'-O-methylguanosine
  modified_base 38: mod_base = OTHER; note = 2'-O-methyluridine
  modified_base 39: mod_base = OTHER; note = 2'-O-methyladenosine
  modified_base 40: mod_base = OTHER; note = 2'-O-methyluridine
  modified_base 41: mod_base = OTHER; note = 2'-O-methylcytidine
  modified_base 42: mod_base = OTHER; note = 2'-O-methylcytidine
  modified_base 43: mod_base = OTHER; note = 2'-O-methylcytidine
  modified_base 44: mod_base = OTHER; note = 2'-O-methyladenosine
  modified_base 45: mod_base = OTHER; note = 2'-O-methylcytidine
  modified_base 46: mod_base = OTHER; note = 2'-O-methylguanosine
  modified_base 47: mod_base = OTHER; note = 2'-O-methylcytidine
  modified_base 48: mod_base = OTHER; note = 2'-O-methyladenosine
  modified_base 49: mod_base = OTHER; note = 2'-O-methylcytidine
  modified_base 50: mod_base = OTHER; note = 2'-O-methyladenosine
  modified_base 51: mod_base = OTHER; note = 2'-O-methylguanosine
  modified_base 54: mod_base = OTHER; note = Arabinocytidine
  modified_base 55: mod_base = OTHER; note = 2'-O-methyladenosine
  modified_base 56: mod_base = OTHER; note = 2'-O-methylguanosine
  modified_base 57: mod_base = OTHER; note = 2'-O-methyladenosine
  modified_base 58: mod_base = OTHER; note = 2'-O-methyluridine
  modified_base 59: mod_base = OTHER; note = 2'-O-methyladenosine phosphorothioate
  modified_base 60: mod_base = OTHER; note = 2'-O-methylguanosine phosphorothioate
  modified_base 61: mod_base = OTHER; note = 2'-O-methyladenosine phosphorothioate
  modified_base 62: mod_base = OTHER; note = 2'-O-methyladenosine phosphorothioate
  modified_base 63: mod_base = OTHER; note = 2'-O-methylguanosine
  misc_feature 1..51: note = RNA
  misc_feature 52..53: note = DNA
  misc_feature 54..63: note = RNA

SEQ ID NO: 149 - RNA, 63 nt, synthetic construct; identical to SEQ ID NO: 145
  source 1..63: mol_type = other RNA; note = Description of Artificial Sequence: Synthetic oligonucleotide
  modified_base 1: mod_base = OTHER; note = 2'-O-methylguanosine phosphorothioate
  modified_base 2: mod_base = OTHER; note = 2'-O-methyluridine phosphorothioate
  modified_base 3: mod_base = OTHER; note = 2'-O-methylguanosine phosphorothioate
  modified_base 4: mod_base = OTHER; note = 2'-O-methylguanosine phosphorothioate
  modified_base 5: mod_base = OTHER; note = 2'-O-methyladenosine
  modified_base 6: mod_base = OTHER; note = 2'-O-methyladenosine
  modified_base 7: mod_base = OTHER; note = 2'-O-methyluridine
  modified_base 8: mod_base = OTHER; note = 2'-O-methyladenosine
  modified_base 9: mod_base = OTHER; note = 2'-O-methylguanosine
  modified_base 10: mod_base = OTHER; note = 2'-O-methyluridine
  modified_base 11: mod_base = OTHER; note = 2'-O-methyladenosine
  modified_base 12: mod_base = OTHER; note = 2'-O-methyluridine
  modified_base 13: mod_base = OTHER; note = 2'-O-methyladenosine
  modified_base 14: mod_base = OTHER; note = 2'-O-methyladenosine
  modified_base 15: mod_base = OTHER; note = 2'-O-methylcytidine
  modified_base 16: mod_base = OTHER; note = 2'-O-methyladenosine
  modified_base 17: mod_base = OTHER; note = 2'-O-methyladenosine
  modified_base 18: mod_base = OTHER; note = 2'-O-methyluridine
  modified_base 19: mod_base = OTHER; note = 2'-O-methyladenosine
  modified_base 20: mod_base = OTHER; note = 2'-O-methyluridine
  modified_base 21: mod_base = OTHER; note = 2'-O-methylguanosine
  modified_base 22: mod_base = OTHER; note = 2'-O-methylcytidine
  modified_base 23: mod_base = OTHER; note = 2'-O-methyluridine
  modified_base 24: mod_base = OTHER; note = 2'-O-methyladenosine
  modified_base 25: mod_base = OTHER; note = 2'-O-methyladenosine
  modified_base 26: mod_base = OTHER; note = 2'-O-methyladenosine
  modified_base 27: mod_base = OTHER; note = 2'-O-methyluridine
  modified_base 28: mod_base = OTHER; note = 2'-O-methylguanosine
  modified_base 29: mod_base = OTHER; note = 2'-O-methyluridine
  modified_base 30: mod_base = OTHER; note = 2'-O-methyluridine
  modified_base 31: mod_base = OTHER; note = 2'-O-methylguanosine
  modified_base 32: mod_base = OTHER; note = 2'-O-methyluridine
  modified_base 33: mod_base = OTHER; note = 2'-O-methyluridine
  modified_base 34: mod_base = OTHER; note = 2'-O-methyladenosine
  modified_base 35: mod_base = OTHER; note = 2'-O-methyluridine
  modified_base 36: mod_base = OTHER; note = 2'-O-methyladenosine
  modified_base 37: mod_base = OTHER; note = 2'-O-methylguanosine
  modified_base 38: mod_base = OTHER; note = 2'-O-methyluridine
  modified_base 39: mod_base = OTHER; note = 2'-O-methyladenosine
  modified_base 40: mod_base = OTHER; note = 2'-O-methyluridine
  modified_base 41: mod_base = OTHER; note = 2'-O-methylcytidine
  modified_base 42: mod_base = OTHER; note = 2'-O-methylcytidine
  modified_base 43: mod_base = OTHER; note = 2'-O-methylcytidine
  modified_base 44: mod_base = OTHER; note = 2'-O-methyladenosine
  modified_base 45: mod_base = OTHER; note = 2'-O-methylcytidine
  modified_base 46: mod_base = OTHER; note = 2'-O-methylguanosine
  modified_base 47: mod_base = OTHER; note = 2'-O-methylcytidine
  modified_base 48: mod_base = OTHER; note = 2'-O-methyladenosine
  modified_base 49: mod_base = OTHER; note = 2'-O-methylcytidine
  modified_base 50: mod_base = OTHER; note = 2'-O-methyladenosine
  modified_base 51: mod_base = OTHER; note = 2'-O-methylguanosine
  modified_base 52: mod_base = OTHER; note = Arabinoadenosine
  modified_base 53: mod_base = OTHER; note = Arabinocytidine
  modified_base 54: mod_base = OTHER; note = Arabinocytidine
  modified_base 55: mod_base = OTHER; note = 2'-O-methyladenosine
  modified_base 56: mod_base = OTHER; note = 2'-O-methylguanosine
  modified_base 57: mod_base = OTHER; note = 2'-O-methyladenosine
  modified_base 58: mod_base = OTHER; note = 2'-O-methyluridine
  modified_base 59: mod_base = OTHER; note = 2'-O-methyladenosine phosphorothioate
  modified_base 60: mod_base = OTHER; note = 2'-O-methylguanosine phosphorothioate
  modified_base 61: mod_base = OTHER; note = 2'-O-methyladenosine phosphorothioate
  modified_base 62: mod_base = OTHER; note = 2'-O-methyladenosine phosphorothioate
  modified_base 63: mod_base = OTHER; note = 2'-O-methylguanosine

SEQ ID NO: 150 - DNA, 63 bp, synthetic construct; identical to SEQ ID NO: 83
  source 1..63: mol_type = other DNA; note = Description of Artificial Sequence: Synthetic oligonucleotide; note = Description of Combined DNA/RNA Molecule: Synthetic oligonucleotide
  modified_base 1: mod_base = OTHER; note = 2'-O-methylguanosine phosphorothioate
  modified_base 2: mod_base = OTHER; note = 2'-O-methyluridine phosphorothioate
  modified_base 3: mod_base = OTHER; note = 2'-O-methylguanosine phosphorothioate
  modified_base 4: mod_base = OTHER; note = 2'-O-methylguanosine phosphorothioate
  modified_base 5: mod_base = OTHER; note = 2'-O-methyladenosine
  modified_base 6: mod_base = OTHER; note = 2'-O-methyladenosine
  modified_base 7: mod_base = OTHER; note = 2'-O-methyluridine
  modified_base 8: mod_base = OTHER; note = 2'-O-methyladenosine
  modified_base 9: mod_base = OTHER; note = 2'-O-methylguanosine
  modified_base 10: mod_base = OTHER; note = 2'-O-methyluridine
  modified_base 11: mod_base = OTHER; note = 2'-O-methyladenosine
  modified_base 12: mod_base = OTHER; note = 2'-O-methyluridine
  modified_base 13: mod_base = OTHER; note = 2'-O-methyladenosine
  modified_base 14: mod_base = OTHER; note = 2'-O-methyladenosine
  modified_base 15: mod_base = OTHER; note = 2'-O-methylcytidine
  modified_base 16: mod_base = OTHER; note = 2'-O-methyladenosine
  modified_base 17: mod_base = OTHER; note = 2'-O-methyladenosine
  modified_base 18: mod_base = OTHER; note = 2'-O-methyluridine
  modified_base 19: mod_base = OTHER; note = 2'-O-methyladenosine
  modified_base 20: mod_base = OTHER; note = 2'-O-methyluridine
  modified_base 21: mod_base = OTHER; note = 2'-O-methylguanosine
  modified_base 22: mod_base = OTHER; note = 2'-O-methylcytidine
  modified_base 23: mod_base = OTHER; note = 2'-O-methyluridine
  modified_base 24: mod_base = OTHER; note = 2'-O-methyladenosine
  modified_base 25: mod_base = OTHER; note = 2'-O-methyladenosine
  modified_base 26: mod_base = OTHER; note = 2'-O-methyladenosine
  modified_base 27: mod_base = OTHER; note = 2'-O-methyluridine
  modified_base 28: mod_base = OTHER; note = 2'-O-methylguanosine
  modified_base 29: mod_base = OTHER; note = 2'-O-methyluridine
  modified_base 30: mod_base = OTHER; note = 2'-O-methyluridine
  modified_base 31: mod_base = OTHER; note = 2'-O-methylguanosine
  modified_base 32: mod_base = OTHER; note = 2'-O-methyluridine
  modified_base 33: mod_base = OTHER; note = 2'-O-methyluridine
  modified_base 34: mod_base = OTHER; note = 2'-O-methyladenosine
  modified_base 35: mod_base = OTHER; note = 2'-O-methyluridine
  modified_base 36: mod_base = OTHER; note = 2'-O-methyladenosine
  modified_base 37: mod_base = OTHER; note = 2'-O-methylguanosine
  modified_base 38: mod_base = OTHER; note = 2'-O-methyluridine
  modified_base 39: mod_base = OTHER; note = 2'-O-methyladenosine
  modified_base 40: mod_base = OTHER; note = 2'-O-methyluridine
  modified_base 41: mod_base = OTHER; note = 2'-O-methylcytidine
  modified_base 42: mod_base = OTHER; note = 2'-O-methylcytidine
  modified_base 43: mod_base = OTHER; note = 2'-O-methylcytidine
  modified_base 44: mod_base = OTHER; note = 2'-O-methyladenosine
  modified_base 45: mod_base = OTHER; note = 2'-O-methylcytidine
  modified_base 46: mod_base = OTHER; note = 2'-O-methylguanosine
  modified_base 47: mod_base = OTHER; note = 2'-O-methylcytidine
  modified_base 48: mod_base = OTHER; note = 2'-O-methyladenosine
  modified_base 49: mod_base = OTHER; note = 2'-O-methylcytidine
  modified_base 50: mod_base = OTHER; note = 2'-O-methyladenosine
  modified_base 51: mod_base = OTHER; note = 2'-O-methylguanosine
  modified_base 52: mod_base = OTHER; note = 2'-OMe-arabinoadenosine
  modified_base 55: mod_base = OTHER; note = 2'-O-methyladenosine
  modified_base 56: mod_base = OTHER; note = 2'-O-methylguanosine
  modified_base 57: mod_base = OTHER; note = 2'-O-methyladenosine
  modified_base 58: mod_base = OTHER; note = 2'-O-methyluridine
  modified_base 59: mod_base = OTHER; note = 2'-O-methyladenosine phosphorothioate
  modified_base 60: mod_base = OTHER; note = 2'-O-methylguanosine phosphorothioate
  modified_base 61: mod_base = OTHER; note = 2'-O-methyladenosine phosphorothioate
  modified_base 62: mod_base = OTHER; note = 2'-O-methyladenosine phosphorothioate
  modified_base 63: mod_base = OTHER; note = 2'-O-methylguanosine
  misc_feature 1..52: note = RNA
  misc_feature 53..54: note = DNA
  misc_feature 55..63: note = RNA

SEQ ID NO: 151 - DNA, 63 bp, synthetic construct; identical to SEQ ID NO: 83
  source 1..63: mol_type = other DNA; note = Description of Artificial Sequence: Synthetic oligonucleotide; note = Description of Combined DNA/RNA Molecule: Synthetic oligonucleotide
  modified_base 1: mod_base = OTHER; note = 2'-O-methylguanosine phosphorothioate
  modified_base 2: mod_base = OTHER; note = 2'-O-methyluridine phosphorothioate
  modified_base 3: mod_base = OTHER; note = 2'-O-methylguanosine phosphorothioate
  modified_base 4: mod_base = OTHER; note = 2'-O-methylguanosine phosphorothioate
  modified_base 5: mod_base = OTHER; note = 2'-O-methyladenosine
  modified_base 6: mod_base = OTHER; note = 2'-O-methyladenosine
  modified_base 7: mod_base = OTHER; note = 2'-O-methyluridine
  modified_base 8: mod_base = OTHER; note = 2'-O-methyladenosine
  modified_base 9: mod_base = OTHER; note = 2'-O-methylguanosine
  modified_base 10: mod_base = OTHER; note = 2'-O-methyluridine
  modified_base 11: mod_base = OTHER; note = 2'-O-methyladenosine
  modified_base 12: mod_base = OTHER; note = 2'-O-methyluridine
  modified_base 13: mod_base = OTHER; note = 2'-O-methyladenosine
  modified_base 14: mod_base = OTHER; note = 2'-O-methyladenosine
  modified_base 15: mod_base = OTHER; note = 2'-O-methylcytidine
  modified_base 16: mod_base = OTHER; note = 2'-O-methyladenosine
  modified_base 17: mod_base = OTHER; note = 2'-O-methyladenosine
  modified_base 18: mod_base = OTHER; note = 2'-O-methyluridine
  modified_base 19: mod_base = OTHER; note = 2'-O-methyladenosine
  modified_base 20: mod_base = OTHER; note = 2'-O-methyluridine
  modified_base 21: mod_base = OTHER; note = 2'-O-methylguanosine
  modified_base 22: mod_base = OTHER; note = 2'-O-methylcytidine
  modified_base 23: mod_base = OTHER; note = 2'-O-methyluridine
  modified_base 24: mod_base = OTHER; note = 2'-O-methyladenosine
  modified_base 25: mod_base = OTHER; note = 2'-O-methyladenosine
  modified_base 26: mod_base = OTHER; note = 2'-O-methyladenosine
  modified_base 27: mod_base = OTHER; note = 2'-O-methyluridine
  modified_base 28: mod_base = OTHER; note = 2'-O-methylguanosine
  modified_base 29: mod_base = OTHER; note = 2'-O-methyluridine
  modified_base 30: mod_base = OTHER; note = 2'-O-methyluridine
  modified_base 31: mod_base = OTHER; note = 2'-O-methylguanosine
  modified_base 32: mod_base = OTHER; note = 2'-O-methyluridine
  modified_base 33: mod_base = OTHER; note = 2'-O-methyluridine
  modified_base 34: mod_base = OTHER; note = 2'-O-methyladenosine
  modified_base 35: mod_base = OTHER; note = 2'-O-methyluridine
  modified_base 36: mod_base = OTHER; note = 2'-O-methyladenosine
  modified_base 37: mod_base = OTHER; note = 2'-O-methylguanosine
  modified_base 38: mod_base = OTHER; note = 2'-O-methyluridine
  modified_base 39: mod_base = OTHER; note = 2'-O-methyladenosine
  modified_base 40: mod_base = OTHER; note = 2'-O-methyluridine
  modified_base 41: mod_base = OTHER; note = 2'-O-methylcytidine
  modified_base 42: mod_base = OTHER; note = 2'-O-methylcytidine
  modified_base 43: mod_base = OTHER; note = 2'-O-methylcytidine
  modified_base 44: mod_base = OTHER; note = 2'-O-methyladenosine
  modified_base 45: mod_base = OTHER; note = 2'-O-methylcytidine
  modified_base 46: mod_base = OTHER; note = 2'-O-methylguanosine
  modified_base 47: mod_base = OTHER; note = 2'-O-methylcytidine
  modified_base 48: mod_base = OTHER; note = 2'-O-methyladenosine
  modified_base 49: mod_base = OTHER; note = 2'-O-methylcytidine
  modified_base 50: mod_base = OTHER; note = 2'-O-methyladenosine
  modified_base 51: mod_base = OTHER; note = 2'-O-methylguanosine
  modified_base 53: mod_base = OTHER; note = 2'-OMe-arabinocytidine
  modified_base 55: mod_base = OTHER; note = 2'-O-methyladenosine
  modified_base 56: mod_base = OTHER; note = 2'-O-methylguanosine
  modified_base 57: mod_base = OTHER; note = 2'-O-methyladenosine
  modified_base 58: mod_base = OTHER; note = 2'-O-methyluridine
  modified_base 59: mod_base = OTHER; note = 2'-O-methyladenosine phosphorothioate
  modified_base 60: mod_base = OTHER; note = 2'-O-methylguanosine phosphorothioate
  modified_base 61: mod_base = OTHER; note = 2'-O-methyladenosine phosphorothioate
  modified_base 62: mod_base = OTHER; note = 2'-O-methyladenosine phosphorothioate
  modified_base 63: mod_base = OTHER; note = 2'-O-methylguanosine
  misc_feature 1..51: note = RNA
  misc_feature 52: note = DNA
  misc_feature 53: note = RNA
  misc_feature 54: note = DNA
  misc_feature 55..63: note = RNA

SEQ ID NO: 152 - DNA, 63 bp, synthetic construct; identical to SEQ ID NO: 83
  source 1..63: mol_type = other DNA; note = Description of Artificial Sequence: Synthetic oligonucleotide; note = Description of Combined DNA/RNA Molecule: Synthetic oligonucleotide
  modified_base 1: mod_base = OTHER; note = 2'-O-methylguanosine phosphorothioate
  modified_base 2: mod_base = OTHER; note = 2'-O-methyluridine phosphorothioate
  modified_base 3: mod_base = OTHER; note = 2'-O-methylguanosine phosphorothioate
  modified_base 4: mod_base = OTHER; note = 2'-O-methylguanosine phosphorothioate
  modified_base 5: mod_base = OTHER; note = 2'-O-methyladenosine
  modified_base 6: mod_base = OTHER; note = 2'-O-methyladenosine
  modified_base 7: mod_base = OTHER; note = 2'-O-methyluridine
  modified_base 8: mod_base = OTHER; note = 2'-O-methyladenosine
  modified_base 9: mod_base = OTHER; note = 2'-O-methylguanosine
  modified_base 10: mod_base = OTHER; note = 2'-O-methyluridine
  modified_base 11: mod_base = OTHER; note = 2'-O-methyladenosine
  modified_base 12: mod_base = OTHER; note = 2'-O-methyluridine
  modified_base 13: mod_base = OTHER; note = 2'-O-methyladenosine
  modified_base 14: mod_base = OTHER; note = 2'-O-methyladenosine
  modified_base 15: mod_base = OTHER; note = 2'-O-methylcytidine
  modified_base 16: mod_base = OTHER; note = 2'-O-methyladenosine
  modified_base 17: mod_base = OTHER; note = 2'-O-methyladenosine
  modified_base 18: mod_base = OTHER; note = 2'-O-methyluridine
  modified_base 19: mod_base = OTHER; note = 2'-O-methyladenosine
  modified_base 20: mod_base = OTHER; note = 2'-O-methyluridine
  modified_base 21: mod_base = OTHER; note = 2'-O-methylguanosine
  modified_base 22: mod_base = OTHER; note = 2'-O-methylcytidine
  modified_base 23: mod_base = OTHER; note = 2'-O-methyluridine
  modified_base 24: mod_base = OTHER; note = 2'-O-methyladenosine
  modified_base 25: mod_base = OTHER; note = 2'-O-methyladenosine
  modified_base 26: mod_base = OTHER; note = 2'-O-methyladenosine
  modified_base 27: mod_base = OTHER; note = 2'-O-methyluridine
  modified_base 28: mod_base = OTHER; note = 2'-O-methylguanosine
  modified_base 29: mod_base = OTHER; note = 2'-O-methyluridine
  modified_base 30: mod_base = OTHER; note = 2'-O-methyluridine
  modified_base 31: mod_base = OTHER; note = 2'-O-methylguanosine
  modified_base 32: mod_base = OTHER; note = 2'-O-methyluridine
  modified_base 33: mod_base = OTHER; note = 2'-O-methyluridine
  modified_base 34: mod_base = OTHER; note = 2'-O-methyladenosine
  modified_base 35: mod_base = OTHER; note = 2'-O-methyluridine
  modified_base 36: mod_base = OTHER; note = 2'-O-methyladenosine
  modified_base 37: mod_base = OTHER; note = 2'-O-methylguanosine
  modified_base 38: mod_base = OTHER; note = 2'-O-methyluridine
  modified_base 39: mod_base = OTHER; note = 2'-O-methyladenosine
  modified_base 40: mod_base = OTHER; note = 2'-O-methyluridine
  modified_base 41: mod_base = OTHER; note = 2'-O-methylcytidine
  modified_base 42: mod_base = OTHER; note = 2'-O-methylcytidine
  modified_base 43: mod_base = OTHER; note = 2'-O-methylcytidine
  modified_base 44: mod_base = OTHER; note = 2'-O-methyladenosine
  modified_base 45: mod_base = OTHER; note = 2'-O-methylcytidine
  modified_base 46: mod_base = OTHER; note = 2'-O-methylguanosine
  modified_base 47: mod_base = OTHER; note = 2'-O-methylcytidine
  modified_base 48: mod_base = OTHER; note = 2'-O-methyladenosine
  modified_base 49: mod_base = OTHER; note = 2'-O-methylcytidine
  modified_base 50: mod_base = OTHER; note = 2'-O-methyladenosine
  modified_base 51: mod_base = OTHER; note = 2'-O-methylguanosine
  modified_base 54: mod_base = OTHER; note = 2'-OMe-arabinocytidine
  modified_base 55: mod_base = OTHER; note = 2'-O-methyladenosine
  modified_base 56: mod_base = OTHER; note = 2'-O-methylguanosine
  modified_base 57: mod_base = OTHER; note = 2'-O-methyladenosine
  modified_base 58: mod_base = OTHER; note = 2'-O-methyluridine
  modified_base 59: mod_base = OTHER; note = 2'-O-methyladenosine phosphorothioate
  modified_base 60: mod_base = OTHER; note = 2'-O-methylguanosine phosphorothioate
  modified_base 61: mod_base = OTHER; note = 2'-O-methyladenosine phosphorothioate
  modified_base 62: mod_base = OTHER; note = 2'-O-methyladenosine phosphorothioate
  modified_base 63: mod_base = OTHER; note = 2'-O-methylguanosine
  misc_feature 1..51: note = RNA
  misc_feature 52..53: note = DNA
  misc_feature 54..63: note = RNA

SEQ ID NO: 153 - DNA, 63 bp, synthetic construct; identical to SEQ ID NO: 83
  source 1..63: mol_type = other DNA; note = Description of Artificial Sequence: Synthetic oligonucleotide; note = Description of Combined DNA/RNA Molecule: Synthetic oligonucleotide
  modified_base 1: mod_base = OTHER; note = 2'-O-methylguanosine phosphorothioate
  modified_base 2: mod_base = OTHER; note = 2'-O-methyluridine phosphorothioate
  modified_base 3: mod_base = OTHER; note = 2'-O-methylguanosine phosphorothioate
  modified_base 4: mod_base = OTHER; note = 2'-O-methylguanosine phosphorothioate
  modified_base 5: mod_base = OTHER; note = 2'-O-methyladenosine
  modified_base 6: mod_base = OTHER; note = 2'-O-methyladenosine
  modified_base 7: mod_base = OTHER; note = 2'-O-methyluridine
  modified_base 8: mod_base = OTHER; note = 2'-O-methyladenosine
  modified_base 9: mod_base = OTHER; note = 2'-O-methylguanosine
  modified_base 10: mod_base = OTHER; note = 2'-O-methyluridine
  modified_base 11: mod_base = OTHER; note = 2'-O-methyladenosine
  modified_base 12: mod_base = OTHER; note = 2'-O-methyluridine
  modified_base 13: mod_base = OTHER; note = 2'-O-methyladenosine
  modified_base 14: mod_base = OTHER; note = 2'-O-methyladenosine
  modified_base 15: mod_base = OTHER; note = 2'-O-methylcytidine
  modified_base 16: mod_base = OTHER; note = 2'-O-methyladenosine
  modified_base 17: mod_base = OTHER; note = 2'-O-methyladenosine
  modified_base 18: mod_base = OTHER; note = 2'-O-methyluridine
  modified_base 19: mod_base = OTHER; note = 2'-O-methyladenosine
  modified_base 20: mod_base = OTHER; note = 2'-O-methyluridine
  modified_base 21: mod_base = OTHER; note = 2'-O-methylguanosine
  modified_base 22: mod_base = OTHER; note = 2'-O-methylcytidine
  modified_base 23: mod_base = OTHER; note = 2'-O-methyluridine
  modified_base 24: mod_base = OTHER; note = 2'-O-methyladenosine
  modified_base 25: mod_base = OTHER; note = 2'-O-methyladenosine
  modified_base 26: mod_base = OTHER; note = 2'-O-methyladenosine
  modified_base 27: mod_base = OTHER; note = 2'-O-methyluridine
  modified_base 28: mod_base = OTHER; note = 2'-O-methylguanosine
  modified_base 29: mod_base = OTHER; note = 2'-O-methyluridine
  modified_base 30: mod_base = OTHER; note = 2'-O-methyluridine
  modified_base 31: mod_base = OTHER; note = 2'-O-methylguanosine
  modified_base 32: mod_base = OTHER; note = 2'-O-methyluridine
  modified_base 33: mod_base = OTHER; note = 2'-O-methyluridine
  modified_base 34: mod_base = OTHER; note = 2'-O-methyladenosine
  modified_base 35: mod_base = OTHER; note = 2'-O-methyluridine
  modified_base 36: mod_base = OTHER; note = 2'-O-methyladenosine
  modified_base 37: mod_base = OTHER; note = 2'-O-methylguanosine
  modified_base 38: mod_base = OTHER; note = 2'-O-methyluridine
  modified_base 39: mod_base = OTHER; note = 2'-O-methyladenosine
  modified_base 40: mod_base = OTHER; note = 2'-O-methyluridine
  modified_base 41: mod_base = OTHER; note = 2'-O-methylcytidine
  modified_base 42: mod_base = OTHER; note = 2'-O-methylcytidine
  modified_base 43: mod_base = OTHER; note = 2'-O-methylcytidine
  modified_base 44: mod_base = OTHER; note = 2'-O-methyladenosine
  modified_base 45: mod_base = OTHER; note = 2'-O-methylcytidine
  modified_base 46: mod_base = OTHER; note = 2'-O-methylguanosine
  modified_base 47: mod_base = OTHER; note = 2'-O-methylcytidine
  modified_base 48: mod_base = OTHER; note = 2'-O-methyladenosine
  modified_base 49: mod_base = OTHER; note = 2'-O-methylcytidine
  modified_base 50: mod_base = OTHER; note = 2'-O-methyladenosine
  modified_base 51: mod_base = OTHER; note = 2'-O-methylguanosine
  modified_base 53: mod_base = OTHER; note = Alpha-anomer cytidine
  modified_base 55: mod_base = OTHER; note = 2'-O-methyladenosine
  modified_base 56: mod_base = OTHER; note = 2'-O-methylguanosine
  modified_base 57: mod_base = OTHER; note = 2'-O-methyladenosine
  modified_base 58: mod_base = OTHER; note = 2'-O-methyluridine
  modified_base 59: mod_base = OTHER; note = 2'-O-methyladenosine phosphorothioate
  modified_base 60: mod_base = OTHER; note = 2'-O-methylguanosine phosphorothioate
  modified_base 61: mod_base = OTHER; note = 2'-O-methyladenosine phosphorothioate
  modified_base 62: mod_base = OTHER; note = 2'-O-methyladenosine phosphorothioate
  modified_base 63: mod_base = OTHER; note = 2'-O-methylguanosine
  misc_feature 1..51: note = RNA
  misc_feature 52..54: note = DNA
  misc_feature 55..63: note = RNA

SEQ ID NO: 154 - DNA, 63 bp, synthetic construct
  source 1..63: mol_type = other DNA; note = Description of Artificial Sequence: Synthetic oligonucleotide; note = Description of Combined DNA/RNA Molecule: Synthetic oligonucleotide
  modified_base 1: mod_base = OTHER; note = 2'-O-methylguanosine phosphorothioate
  modified_base 2: mod_base = OTHER; note = 2'-O-methyluridine phosphorothioate
  modified_base 3: mod_base = OTHER; note = 2'-O-methylguanosine phosphorothioate
  modified_base 4: mod_base = OTHER; note = 2'-O-methylguanosine phosphorothioate
  modified_base 5: mod_base = OTHER; note = 2'-O-methyladenosine
  modified_base 6: mod_base = OTHER; note = 2'-O-methyladenosine
  modified_base 7: mod_base = OTHER; note = 2'-O-methyluridine
  modified_base 8: mod_base = OTHER; note = 2'-O-methyladenosine
  modified_base 9: mod_base = OTHER; note = 2'-O-methylguanosine
  modified_base 10: mod_base = OTHER; note = 2'-O-methyluridine
  modified_base 11: mod_base = OTHER; note = 2'-O-methyladenosine
  modified_base 12: mod_base = OTHER; note = 2'-O-methyluridine
  modified_base 13: mod_base = OTHER; note = 2'-O-methyladenosine
  modified_base 14: mod_base = OTHER; note = 2'-O-methyladenosine
  modified_base 15: mod_base = OTHER; note = 2'-O-methylcytidine
  modified_base 16: mod_base = OTHER; note = 2'-O-methyladenosine
  modified_base 17: mod_base = OTHER; note = 2'-O-methyladenosine
  modified_base 18: mod_base = OTHER; note = 2'-O-methyluridine
  modified_base 19: mod_base = OTHER; note = 2'-O-methyladenosine
  modified_base 20: mod_base = OTHER; note = 2'-O-methyluridine
  modified_base 21: mod_base = OTHER; note = 2'-O-methylguanosine
  modified_base 22: mod_base = OTHER; note = 2'-O-methylcytidine
  modified_base 23: mod_base = OTHER; note = 2'-O-methyluridine
  modified_base 24: mod_base = OTHER; note = 2'-O-methyladenosine
  modified_base 25: mod_base = OTHER; note = 2'-O-methyladenosine
  modified_base 26: mod_base = OTHER; note = 2'-O-methyladenosine
  modified_base 27: mod_base = OTHER; note = 2'-O-methyluridine
  modified_base 28: mod_base = OTHER; note = 2'-O-methylguanosine
  modified_base 29: mod_base = OTHER; note = 2'-O-methyluridine
  modified_base 30: mod_base = OTHER; note = 2'-O-methyluridine
  modified_base 31: mod_base = OTHER; note = 2'-O-methylguanosine
  modified_base 32: mod_base = OTHER; note = 2'-O-methyluridine
  modified_base 33: mod_base = OTHER; note = 2'-O-methyluridine
  modified_base 34: mod_base = OTHER; note = 2'-O-methyladenosine
  modified_base 35: mod_base = OTHER; note = 2'-O-methyluridine
  modified_base 36: mod_base = OTHER; note = 2'-O-methyladenosine
  modified_base 37: mod_base = OTHER; note = 2'-O-methylguanosine
  modified_base 38: mod_base = OTHER; note = 2'-O-methyluridine
  modified_base 39: mod_base = OTHER; note = 2'-O-methyladenosine
  modified_base 40: mod_base = OTHER; note = 2'-O-methyluridine
  modified_base 41: mod_base = OTHER; note = 2'-O-methylcytidine
  modified_base 42: mod_base = OTHER; note = 2'-O-methylcytidine
  modified_base 43: mod_base = OTHER; note = 2'-O-methylcytidine
  modified_base 44: mod_base = OTHER; note = 2'-O-methyladenosine
  modified_base 45: mod_base = OTHER; note = 2'-O-methylcytidine
  modified_base 46: mod_base = OTHER; note = 2'-O-methylguanosine
  modified_base 47: mod_base = OTHER; note = 2'-O-methylcytidine
  modified_base 48: mod_base = OTHER; note = 2'-O-methyladenosine
  modified_base 49: mod_base = OTHER; note = 2'-O-methylcytidine
  modified_base 50: mod_base = OTHER; note = 2'-O-methyladenosine
  modified_base 51: mod_base = OTHER; note = 2'-O-methylguanosine
  modified_base 53: mod_base = OTHER; note = Abasic nucleotide
  modified_base 55: mod_base = OTHER; note = 2'-O-methyladenosine
  modified_base 56: mod_base = OTHER; note = 2'-O-methylguanosine
  modified_base 57: mod_base = OTHER; note = 2'-O-methyladenosine
  modified_base 58: mod_base = OTHER; note = 2'-O-methyluridine
  modified_base 59: mod_base = OTHER; note = 2'-O-methyladenosine phosphorothioate
  modified_base 60: mod_base = OTHER; note = 2'-O-methylguanosine phosphorothioate
  modified_base 61: mod_base = OTHER; note = 2'-O-methyladenosine phosphorothioate
  modified_base 62: mod_base = OTHER; note = 2'-O-methyladenosine phosphorothioate
  modified_base 63: mod_base = OTHER; note = 2'-O-methylguanosine
  misc_feature 1..51: note = RNA
  misc_feature 52..54: note = DNA
  misc_feature 55..63: note = RNA
gtggaatagtataacaatatgctaaatgttgttatagtatcccacgcacagancagatagaag

SEQ ID NO: 155 - DNA, 63 bp, synthetic construct; identical to SEQ ID NO: 154
  source 1..63: mol_type = other DNA; note = Description of Artificial Sequence: Synthetic oligonucleotide; note = Description of Combined DNA/RNA Molecule: Synthetic oligonucleotide
  modified_base 1: mod_base = OTHER; note = 2'-O-methylguanosine phosphorothioate
  modified_base 2: mod_base = OTHER; note = 2'-O-methyluridine phosphorothioate
  modified_base 3: mod_base = OTHER; note = 2'-O-methylguanosine phosphorothioate
  modified_base 4: mod_base = OTHER; note = 2'-O-methylguanosine phosphorothioate
  modified_base 5: mod_base = OTHER; note = 2'-O-methyladenosine
  modified_base 6: mod_base = OTHER; note = 2'-O-methyladenosine
  modified_base 7: mod_base = OTHER; note = 2'-O-methyluridine
  modified_base 8: mod_base = OTHER; note = 2'-O-methyladenosine
  modified_base 9: mod_base = OTHER; note = 2'-O-methylguanosine
  modified_base 10: mod_base = OTHER; note = 2'-O-methyluridine
  modified_base 11: mod_base = OTHER; note = 2'-O-methyladenosine
  modified_base 12: mod_base = OTHER; note = 2'-O-methyluridine
  modified_base 13: mod_base = OTHER; note = 2'-O-methyladenosine
  modified_base 14: mod_base = OTHER; note = 2'-O-methyladenosine
  modified_base 15: mod_base = OTHER; note = 2'-O-methylcytidine
  modified_base 16: mod_base = OTHER; note = 2'-O-methyladenosine
  modified_base 17: mod_base = OTHER; note = 2'-O-methyladenosine
  modified_base 18: mod_base = OTHER; note = 2'-O-methyluridine
  modified_base 19: mod_base = OTHER; note = 2'-O-methyladenosine
  modified_base 20: mod_base = OTHER; note = 2'-O-methyluridine
  modified_base 21: mod_base = OTHER; note = 2'-O-methylguanosine
  modified_base 22: mod_base = OTHER; note = 2'-O-methylcytidine
  modified_base 23: mod_base = OTHER; note = 2'-O-methyluridine
  modified_base 24: mod_base = OTHER; note = 2'-O-methyladenosine
  modified_base 25: mod_base = OTHER; note = 2'-O-methyladenosine
  modified_base 26: mod_base = OTHER; note = 2'-O-methyladenosine
  modified_base 27: mod_base = OTHER; note = 2'-O-methyluridine
  modified_base 28: mod_base = OTHER; note = 2'-O-methylguanosine
  modified_base 29: mod_base = OTHER; note = 2'-O-methyluridine
  modified_base 30: mod_base = OTHER; note = 2'-O-methyluridine
  modified_base 31: mod_base = OTHER; note = 2'-O-methylguanosine
  modified_base 32: mod_base = OTHER; note = 2'-O-methyluridine
  modified_base 33: mod_base = OTHER; note = 2'-O-methyluridine
  modified_base 34: mod_base = OTHER; note = 2'-O-methyladenosine
  modified_base 35: mod_base = OTHER; note = 2'-O-methyluridine
  modified_base 36: mod_base = OTHER; note = 2'-O-methyladenosine
  modified_base 37: mod_base = OTHER; note = 2'-O-methylguanosine
  modified_base 38: mod_base = OTHER; note = 2'-O-methyluridine
  modified_base 39: mod_base = OTHER; note = 2'-O-methyladenosine
  modified_base 40: mod_base = OTHER; note = 2'-O-methyluridine
  modified_base 41: mod_base = OTHER; note = 2'-O-methylcytidine
  modified_base 42: mod_base = OTHER; note = 2'-O-methylcytidine
  modified_base 43: mod_base = OTHER; note = 2'-O-methylcytidine
  modified_base 44: mod_base = OTHER; note = 2'-O-methyladenosine
  modified_base 45: mod_base = OTHER; note = 2'-O-methylcytidine
  modified_base 46: mod_base = OTHER; note = 2'-O-methylguanosine
  modified_base 47: mod_base = OTHER; note = 2'-O-methylcytidine
  modified_base 48: mod_base = OTHER; note = 2'-O-methyladenosine
  modified_base 49: mod_base = OTHER; note = 2'-O-methylcytidine
  modified_base 50: mod_base = OTHER; note = 2'-O-methyladenosine
  modified_base 51: mod_base = OTHER; note = 2'-O-methylguanosine
  modified_base 53: mod_base = OTHER; note = Abasic nucleotide
  modified_base 55: mod_base = OTHER; note = 2'-O-methyladenosine
  modified_base 56: mod_base = OTHER; note = 2'-O-methylguanosine
  modified_base 57: mod_base = OTHER; note = 2'-O-methyladenosine
  modified_base 58: mod_base = OTHER; note = 2'-O-methyluridine
  modified_base 59: mod_base = OTHER; note = 2'-O-methyladenosine phosphorothioate
  modified_base 60: mod_base = OTHER; note = 2'-O-methylguanosine phosphorothioate
  modified_base 61: mod_base = OTHER; note = 2'-O-methyladenosine phosphorothioate
  modified_base 62: mod_base = OTHER; note = 2'-O-methyladenosine phosphorothioate
  modified_base 63: mod_base = OTHER; note = 2'-O-methylguanosine
  misc_feature 1..51: note = RNA
  misc_feature 52: note = DNA
  misc_feature 53: note = RNA
  misc_feature 54: note = DNA
  misc_feature 55..63: note = RNA

SEQ ID NO: 156 - DNA, 63 bp, synthetic construct; identical to SEQ ID NO: 154
  source 1..63: mol_type = other DNA; note = Description of Artificial Sequence: Synthetic oligonucleotide; note = Description of Combined DNA/RNA Molecule: Synthetic oligonucleotide
  modified_base 1: mod_base = OTHER; note = 2'-O-methylguanosine phosphorothioate
  modified_base 2: mod_base = OTHER; note = 2'-O-methyluridine phosphorothioate
  modified_base 3: mod_base = OTHER; note = 2'-O-methylguanosine phosphorothioate
  modified_base 4: mod_base = OTHER; note = 2'-O-methylguanosine phosphorothioate
  modified_base 5: mod_base = OTHER; note = 2'-O-methyladenosine
  modified_base 6: mod_base = OTHER; note = 2'-O-methyladenosine
  modified_base 7: mod_base = OTHER; note = 2'-O-methyluridine
  modified_base 8: mod_base = OTHER; note = 2'-O-methyladenosine
  modified_base 9: mod_base = OTHER; note = 2'-O-methylguanosine
  modified_base 10: mod_base = OTHER; note = 2'-O-methyluridine
  modified_base 11: mod_base = OTHER; note = 2'-O-methyladenosine
  modified_base 12: mod_base = OTHER; note = 2'-O-methyluridine
  modified_base 13: mod_base = OTHER; note = 2'-O-methyladenosine
  modified_base 14: mod_base = OTHER; note = 2'-O-methyladenosine
  modified_base 15: mod_base = OTHER; note = 2'-O-methylcytidine
  modified_base 16: mod_base = OTHER; note = 2'-O-methyladenosine
  modified_base 17: mod_base = OTHER; note = 2'-O-methyladenosine
  modified_base 18: mod_base = OTHER; note = 2'-O-methyluridine
  modified_base 19: mod_base = OTHER; note = 2'-O-methyladenosine
  modified_base 20: mod_base = OTHER; note = 2'-O-methyluridine
  modified_base 21: mod_base = OTHER; note = 2'-O-methylguanosine
  modified_base 22: mod_base = OTHER; note = 2'-O-methylcytidine
  modified_base 23: mod_base = OTHER; note = 2'-O-methyluridine
  modified_base 24: mod_base = OTHER; note = 2'-O-methyladenosine
  modified_base 25: mod_base = OTHER; note = 2'-O-methyladenosine
  modified_base 26: mod_base = OTHER; note = 2'-O-methyladenosine
  modified_base 27: mod_base = OTHER; note = 2'-O-methyluridine
  modified_base 28: mod_base = OTHER; note = 2'-O-methylguanosine
  modified_base 29: mod_base = OTHER; note = 2'-O-methyluridine
  modified_base 30: mod_base = OTHER; note = 2'-O-methyluridine
  modified_base 31: mod_base = OTHER; note = 2'-O-methylguanosine
  modified_base 32: mod_base = OTHER; note = 2'-O-methyluridine
  modified_base 33: mod_base = OTHER; note = 2'-O-methyluridine
  modified_base 34: mod_base = OTHER; note = 2'-O-methyladenosine
  modified_base 35: mod_base = OTHER; note = 2'-O-methyluridine
  modified_base 36: mod_base = OTHER; note = 2'-O-methyladenosine
  modified_base 37: mod_base = OTHER; note = 2'-O-methylguanosine
  modified_base 38: mod_base = OTHER; note = 2'-O-methyluridine
  modified_base 39: mod_base = OTHER; note = 2'-O-methyladenosine
  modified_base 40: mod_base = OTHER; note = 2'-O-methyluridine
  modified_base 41: mod_base = OTHER; note = 2'-O-methylcytidine
  modified_base 42: mod_base = OTHER; note = 2'-O-methylcytidine
  modified_base 43: mod_base = OTHER; note = 2'-O-methylcytidine
  modified_base 44: mod_base = OTHER; note = 2'-O-methyladenosine
  modified_base 45: mod_base = OTHER; note = 2'-O-methylcytidine
  modified_base 46: mod_base = OTHER; note = 2'-O-methylguanosine
  modified_base 47: mod_base = OTHER; note = 2'-O-methylcytidine
  modified_base 48: mod_base = OTHER; note = 2'-O-methyladenosine
  modified_base 49: mod_base = OTHER; note = 2'-O-methylcytidine
  modified_base 50: mod_base = OTHER; note = 2'-O-methyladenosine
  modified_base 51: mod_base = OTHER; note = 2'-O-methylguanosine
  modified_base 53: mod_base = OTHER; note = 2'-OMe-Abasic nucleotide
  modified_base 55: mod_base = OTHER; note = 2'-O-methyladenosine
  modified_base 56: mod_base = OTHER; note = 2'-O-methylguanosine
  modified_base 57: mod_base = OTHER; note = 2'-O-methyladenosine
  modified_base 58: mod_base = OTHER; note = 2'-O-methyluridine
  modified_base 59: mod_base = OTHER; note = 2'-O-methyladenosine phosphorothioate
  modified_base 60: mod_base = OTHER; note = 2'-O-methylguanosine phosphorothioate
  modified_base 61: mod_base = OTHER; note = 2'-O-methyladenosine phosphorothioate
  modified_base 62: mod_base = OTHER; note = 2'-O-methyladenosine phosphorothioate
  modified_base 63: mod_base = OTHER; note = 2'-O-methylguanosine
  misc_feature 1..51: note = RNA
  misc_feature 52: note = DNA
  misc_feature 53: note = RNA
  misc_feature 54: note = DNA
  misc_feature 55..63: note = RNA

SEQ ID NO: 157 - DNA, 63 bp, synthetic construct; identical to SEQ ID NO: 83
  source 1..63: mol_type = other DNA; note = Description of Artificial Sequence: Synthetic oligonucleotide; note = Description of Combined DNA/RNA Molecule: Synthetic oligonucleotide
  modified_base 1: mod_base = OTHER; note = 2'-O-methylguanosine phosphorothioate
  modified_base 2: mod_base = OTHER; note = 2'-O-methyluridine phosphorothioate
  modified_base 3: mod_base = OTHER; note = 2'-O-methylguanosine phosphorothioate
  modified_base 4: mod_base = OTHER; note = 2'-O-methylguanosine phosphorothioate
  modified_base 5: mod_base = OTHER; note = 2'-O-methyladenosine
  modified_base 6: mod_base = OTHER; note = 2'-O-methyladenosine
  modified_base 7: mod_base = OTHER; note = 2'-O-methyluridine
  modified_base 8: mod_base = OTHER; note = 2'-O-methyladenosine
  modified_base 9: mod_base = OTHER; note = 2'-O-methylguanosine
  modified_base 10: mod_base = OTHER; note = 2'-O-methyluridine
  modified_base 11: mod_base = OTHER; note = 2'-O-methyladenosine
  modified_base 12: mod_base = OTHER; note = 2'-O-methyluridine
  modified_base 13: mod_base = OTHER; note = 2'-O-methyladenosine
  modified_base 14: mod_base = OTHER; note = 2'-O-methyladenosine
  modified_base 15: mod_base = OTHER; note = 2'-O-methylcytidine
  modified_base 16: mod_base = OTHER; note = 2'-O-methyladenosine
  modified_base 17: mod_base = OTHER; note = 2'-O-methyladenosine
  modified_base 18: mod_base = OTHER; note = 2'-O-methyluridine
  modified_base 19: mod_base = OTHER; note = 2'-O-methyladenosine
  modified_base 20: mod_base = OTHER; note = 2'-O-methyluridine
  modified_base 21: mod_base = OTHER; note = 2'-O-methylguanosine
  modified_base 22: mod_base = OTHER; note = 2'-O-methylcytidine
  modified_base 23: mod_base = OTHER; note = 2'-O-methyluridine
  modified_base 24: mod_base = OTHER; note = 2'-O-methyladenosine
  modified_base 25: mod_base = OTHER; note = 2'-O-methyladenosine
  modified_base 26: mod_base = OTHER; note = 2'-O-methyladenosine
  modified_base 27: mod_base = OTHER; note = 2'-O-methyluridine
  modified_base 28: mod_base = OTHER; note = 2'-O-methylguanosine
  modified_base 29: mod_base = OTHER; note = 2'-O-methyluridine
  modified_base 30: mod_base = OTHER; note = 2'-O-methyluridine
  modified_base 31: mod_base = OTHER; note = 2'-O-methylguanosine
  modified_base 32: mod_base = OTHER; note = 2'-O-methyluridine
  modified_base 33: mod_base = OTHER; note = 2'-O-methyluridine
  modified_base 34: mod_base = OTHER; note = 2'-O-methyladenosine
  modified_base 35: mod_base = OTHER; note = 2'-O-methyluridine
  modified_base 36: mod_base = OTHER; note = 2'-O-methyladenosine
  modified_base 37: mod_base = OTHER; note = 2'-O-methylguanosine
  modified_base 38: mod_base = OTHER; note = 2'-O-methyluridine
  modified_base 39: mod_base = OTHER; note = 2'-O-methyladenosine
  modified_base 40: mod_base = OTHER; note = 2'-O-methyluridine
  modified_base 41: mod_base = OTHER; note = 2'-O-methylcytidine
  modified_base 42: mod_base = OTHER; note = 2'-O-methylcytidine
  modified_base 43: mod_base = OTHER; note = 2'-O-methylcytidine
  modified_base 44: mod_base = OTHER; note = 2'-O-methyladenosine
  modified_base 45: mod_base = OTHER; note = 2'-O-methylcytidine
  modified_base 46: mod_base = OTHER; note = 2'-O-methylguanosine
  modified_base 47: mod_base = OTHER; note = 2'-O-methylcytidine
  modified_base 48: mod_base = OTHER; note = 2'-O-methyladenosine
  modified_base 49: mod_base = OTHER; note = 2'-O-methylcytidine
  modified_base 50: mod_base = OTHER; note = 2'-O-methyladenosine
  modified_base 51: mod_base = OTHER; note = 2'-O-methylguanosine
  modified_base 52: mod_base = OTHER; note = (S)-glycol adenosine
  modified_base 55: mod_base = OTHER; note = 2'-O-methyladenosine
  modified_base 56: mod_base = OTHER; note = 2'-O-methylguanosine
  modified_base 57: mod_base = OTHER; note = 2'-O-methyladenosine
  modified_base 58: mod_base = OTHER; note = 2'-O-methyluridine
  modified_base 59: mod_base = OTHER; note = 2'-O-methyladenosine phosphorothioate
  modified_base 60: mod_base = OTHER; note = 2'-O-methylguanosine phosphorothioate
  modified_base 61: mod_base = OTHER; note = 2'-O-methyladenosine phosphorothioate
  modified_base 62: mod_base = OTHER; note = 2'-O-methyladenosine phosphorothioate
  modified_base 63: mod_base = OTHER; note = 2'-O-methylguanosine
  misc_feature 1..52: note = RNA
  misc_feature 53..54: note = DNA
  misc_feature 55..63: note = RNA

SEQ ID NO: 158 - DNA, 63 bp, synthetic construct; identical to SEQ ID NO: 83
  source 1..63: mol_type = other DNA; note = Description of Artificial Sequence: Synthetic oligonucleotide; note = Description of Combined DNA/RNA Molecule: Synthetic oligonucleotide
  modified_base 1: mod_base = OTHER; note = 2'-O-methylguanosine phosphorothioate
  modified_base 2: mod_base = OTHER; note = 2'-O-methyluridine phosphorothioate
  modified_base 3: mod_base = OTHER; note = 2'-O-methylguanosine phosphorothioate
  modified_base 4: mod_base = OTHER; note = 2'-O-methylguanosine phosphorothioate
  modified_base 5: mod_base = OTHER; note = 2'-O-methyladenosine
  modified_base 6: mod_base = OTHER; note = 2'-O-methyladenosine
  modified_base 7: mod_base = OTHER; note = 2'-O-methyluridine
  modified_base 8: mod_base = OTHER; note = 2'-O-methyladenosine
  modified_base 9: mod_base = OTHER; note = 2'-O-methylguanosine
  modified_base 10: mod_base = OTHER; note = 2'-O-methyluridine
  modified_base 11: mod_base = OTHER; note = 2'-O-methyladenosine
  modified_base 12: mod_base = OTHER; note = 2'-O-methyluridine
  modified_base 13: mod_base = OTHER; note = 2'-O-methyladenosine
  modified_base 14: mod_base = OTHER; note = 2'-O-methyladenosine
  modified_base 15: mod_base = OTHER; note = 2'-O-methylcytidine
  modified_base 16: mod_base = OTHER; note = 2'-O-methyladenosine
  modified_base 17: mod_base = OTHER; note = 2'-O-methyladenosine
  modified_base 18: mod_base = OTHER; note = 2'-O-methyluridine
  modified_base 19: mod_base = OTHER; note = 2'-O-methyladenosine
  modified_base 20: mod_base = OTHER; note = 2'-O-methyluridine
  modified_base 21: mod_base = OTHER; note = 2'-O-methylguanosine
  modified_base 22: mod_base = OTHER; note = 2'-O-methylcytidine
  modified_base 23: mod_base = OTHER; note = 2'-O-methyluridine
  modified_base 24: mod_base = OTHER; note = 2'-O-methyladenosine
  modified_base 25: mod_base = OTHER; note = 2'-O-methyladenosine
  modified_base 26: mod_base = OTHER; note = 2'-O-methyladenosine
  modified_base 27: mod_base = OTHER; note = 2'-O-methyluridine
  modified_base 28: mod_base = OTHER; note = 2'-O-methylguanosine
  modified_base 29: mod_base = OTHER; note = 2'-O-methyluridine
  modified_base 30: mod_base = OTHER; note = 2'-O-methyluridine
  modified_base 31: mod_base = OTHER; note = 2'-O-methylguanosine
  modified_base 32: mod_base = OTHER; note = 2'-O-methyluridine
  modified_base 33: mod_base = OTHER; note = 2'-O-methyluridine
  modified_base 34: mod_base = OTHER; note = 2'-O-methyladenosine
  modified_base 35: mod_base = OTHER; note = 2'-O-methyluridine
  modified_base 36: mod_base = OTHER; note = 2'-O-methyladenosine
  modified_base 37: mod_base = OTHER; note = 2'-O-methylguanosine
  modified_base 38: mod_base = OTHER; note = 2'-O-methyluridine
  modified_base 39: mod_base = OTHER; note = 2'-O-methyladenosine
  modified_base 40: mod_base = OTHER; note = 2'-O-methyluridine
  modified_base 41: mod_base = OTHER; note = 2'-O-methylcytidine
  modified_base 42: mod_base = OTHER; note = 2'-O-methylcytidine
  modified_base 43: mod_base = OTHER; note = 2'-O-methylcytidine
  modified_base 44: mod_base = OTHER; note = 2'-O-methyladenosine
  modified_base 45: mod_base = OTHER; note = 2'-O-methylcytidine
  modified_base 46: mod_base = OTHER; note = 2'-O-methylguanosine
  modified_base 47: mod_base = OTHER; note = 2'-O-methylcytidine
  modified_base 48: mod_base = OTHER; note = 2'-O-methyladenosine
  modified_base 49: mod_base = OTHER; note = 2'-O-methylcytidine
  modified_base 50: mod_base = OTHER; note = 2'-O-methyladenosine
  modified_base 51: mod_base = OTHER; note = 2'-O-methylguanosine
  modified_base 53: mod_base = OTHER; note = (S)-glycol cytidine
  modified_base 55: mod_base = OTHER; note = 2'-O-methyladenosine
  modified_base 56: mod_base = OTHER; note = 2'-O-methylguanosine
  modified_base 57: mod_base = OTHER; note = 2'-O-methyladenosine
  modified_base 58: mod_base = OTHER; note = 2'-O-methyluridine
  modified_base 59: mod_base = OTHER; note = 2'-O-methyladenosine phosphorothioate
  modified_base 60: mod_base = OTHER; note = 2'-O-methylguanosine phosphorothioate
  modified_base 61: mod_base = OTHER; note = 2'-O-methyladenosine phosphorothioate
  modified_base 62: mod_base = OTHER; note = 2'-O-methyladenosine phosphorothioate
  modified_base 63: mod_base = OTHER; note = 2'-O-methylguanosine
  misc_feature 1..51: note = RNA
  misc_feature 52: note = DNA
  misc_feature 53: note = RNA
  misc_feature 54: note = DNA
  misc_feature 55..63: note = RNA

SEQ ID NO: 159 - DNA, 63 bp, synthetic construct; identical to SEQ ID NO: 83
  source 1..63: mol_type = other DNA; note = Description of Artificial Sequence: Synthetic oligonucleotide; note = Description of Combined DNA/RNA Molecule: Synthetic oligonucleotide
  modified_base 1: mod_base = OTHER; note = 2'-O-methylguanosine phosphorothioate
  modified_base 2: mod_base = OTHER; note = 2'-O-methyluridine phosphorothioate
  modified_base 3: mod_base = OTHER; note = 2'-O-methylguanosine phosphorothioate
  modified_base 4: mod_base = OTHER; note = 2'-O-methylguanosine phosphorothioate
  modified_base 5: mod_base = OTHER; note = 2'-O-methyladenosine
  modified_base 6: mod_base = OTHER; note = 2'-O-methyladenosine
  modified_base 7: mod_base = OTHER; note = 2'-O-methyluridine
  modified_base 8: mod_base = OTHER; note = 2'-O-methyladenosine
  modified_base 9: mod_base = OTHER; note = 2'-O-methylguanosine
  modified_base 10: mod_base = OTHER; note = 2'-O-methyluridine
  modified_base 11: mod_base = OTHER; note = 2'-O-methyladenosine
  modified_base 12: mod_base = OTHER; note = 2'-O-methyluridine
  modified_base 13: mod_base = OTHER; note = 2'-O-methyladenosine
  modified_base 14: mod_base = OTHER; note = 2'-O-methyladenosine
  modified_base 15: mod_base = OTHER; note = 2'-O-methylcytidine
  modified_base 16: mod_base = OTHER; note = 2'-O-methyladenosine
  modified_base 17: mod_base = OTHER; note = 2'-O-methyladenosine
  modified_base 18: mod_base = OTHER; note = 2'-O-methyluridine
  modified_base 19: mod_base = OTHER; note = 2'-O-methyladenosine
  modified_base 20: mod_base = OTHER; note = 2'-O-methyluridine
  modified_base 21: mod_base = OTHER; note = 2'-O-methylguanosine
  modified_base 22: mod_base = OTHER; note = 2'-O-methylcytidine
  modified_base 23: mod_base = OTHER; note = 2'-O-methyluridine
  modified_base 24: mod_base = OTHER; note = 2'-O-methyladenosine
  modified_base 25: mod_base = OTHER; note = 2'-O-methyladenosine
  modified_base 26: mod_base = OTHER; note = 2'-O-methyladenosine
  modified_base 27: mod_base = OTHER; note = 2'-O-methyluridine
  modified_base 28: mod_base = OTHER; note = 2'-O-methylguanosine
  modified_base 29: mod_base = OTHER; note = 2'-O-methyluridine
  modified_base 30: mod_base = OTHER; note = 2'-O-methyluridine
  modified_base 31: mod_base = OTHER; note = 2'-O-methylguanosine
  modified_base 32: mod_base = OTHER; note = 2'-O-methyluridine
  modified_base 33: mod_base = OTHER; note = 2'-O-methyluridine
  modified_base 34: mod_base = OTHER; note = 2'-O-methyladenosine
  modified_base 35: mod_base = OTHER; note = 2'-O-methyluridine
  modified_base 36: mod_base = OTHER; note = 2'-O-methyladenosine
  modified_base 37: mod_base = OTHER; note = 2'-O-methylguanosine
  modified_base 38: mod_base = OTHER; note = 2'-O-methyluridine
  modified_base 39: mod_base = OTHER; note = 2'-O-methyladenosine
  modified_base 40: mod_base = OTHER; note = 2'-O-methyluridine
  modified_base 41: mod_base = OTHER; note = 2'-O-methylcytidine
  modified_base 42: mod_base = OTHER; note = 2'-O-methylcytidine
  modified_base 43: mod_base = OTHER; note = 2'-O-methylcytidine
  modified_base 44: mod_base = OTHER; note = 2'-O-methyladenosine
  modified_base 45: mod_base = OTHER; note = 2'-O-methylcytidine
  modified_base 46: mod_base = OTHER; note = 2'-O-methylguanosine
  modified_base 47: mod_base = OTHER; note = 2'-O-methylcytidine
  modified_base 48: mod_base = OTHER; note = 2'-O-methyladenosine
  modified_base 49: mod_base = OTHER; note = 2'-O-methylcytidine
  modified_base 50: mod_base = OTHER; note = 2'-O-methyladenosine
  modified_base 51: mod_base = OTHER; note = 2'-O-methylguanosine
  modified_base 52: mod_base = OTHER; note = (S)-glycol adenosine
  modified_base 53: mod_base = OTHER; note = (S)-glycol cytidine
  modified_base 55: mod_base = OTHER; note = 2'-O-methyladenosine
  modified_base 56: mod_base = OTHER; note = 2'-O-methylguanosine
  modified_base 57: mod_base = OTHER; note = 2'-O-methyladenosine
  modified_base 58: mod_base = OTHER; note = 2'-O-methyluridine
  modified_base 59: mod_base = OTHER; note = 2'-O-methyladenosine phosphorothioate
  modified_base 60: mod_base = OTHER; note = 2'-O-methylguanosine phosphorothioate
  modified_base 61: mod_base = OTHER; note = 2'-O-methyladenosine phosphorothioate
  modified_base 62: mod_base = OTHER; note = 2'-O-methyladenosine phosphorothioate
  modified_base 63: mod_base = OTHER; note = 2'-O-methylguanosine
  misc_feature 1..53: note = RNA
  misc_feature 54: note = DNA
  misc_feature 55..63: note = RNA

SEQ ID NO: 160 - DNA, 63 bp, synthetic construct; identical to SEQ ID NO: 83
  source 1..63: mol_type = other DNA; note = Description of Artificial Sequence: Synthetic oligonucleotide; note = Description of Combined DNA/RNA Molecule: Synthetic oligonucleotide
  modified_base 1: mod_base = OTHER; note = 2'-O-methylguanosine phosphorothioate
  modified_base 2: mod_base = OTHER; note = 2'-O-methyluridine phosphorothioate
  modified_base 3: mod_base = OTHER; note = 2'-O-methylguanosine phosphorothioate
  modified_base 4: mod_base = OTHER; note = 2'-O-methylguanosine phosphorothioate
  modified_base 5: mod_base = OTHER; note = 2'-O-methyladenosine
  modified_base 6: mod_base = OTHER; note = 2'-O-methyladenosine
  modified_base 7: mod_base = OTHER; note = 2'-O-methyluridine
  modified_base 8: mod_base = OTHER; note = 2'-O-methyladenosine
  modified_base 9: mod_base = OTHER; note = 2'-O-methylguanosine
  modified_base 10: mod_base = OTHER; note = 2'-O-methyluridine
  modified_base 11: mod_base = OTHER; note = 2'-O-methyladenosine
  modified_base 12: mod_base = OTHER; note = 2'-O-methyluridine
  modified_base 13: mod_base = OTHER; note = 2'-O-methyladenosine
  modified_base 14: mod_base = OTHER; note = 2'-O-methyladenosine
  modified_base 15: mod_base = OTHER; note = 2'-O-methylcytidine
  modified_base 16: mod_base = OTHER; note = 2'-O-methyladenosine
  modified_base 17: mod_base = OTHER; note = 2'-O-methyladenosine
  modified_base 18: mod_base = OTHER; note = 2'-O-methyluridine
  modified_base 19: mod_base = OTHER; note = 2'-O-methyladenosine
  modified_base 20: mod_base = OTHER; note = 2'-O-methyluridine
  modified_base 21: mod_base = OTHER; note = 2'-O-methylguanosine
  modified_base 22: mod_base = OTHER; note = 2'-O-methylcytidine
  modified_base 23: mod_base = OTHER; note = 2'-O-methyluridine
  modified_base 24: mod_base = OTHER; note = 2'-O-methyladenosine
  modified_base 25: mod_base = OTHER; note = 2'-O-methyladenosine
  modified_base 26: mod_base = OTHER; note = 2'-O-methyladenosine
  modified_base 27: mod_base = OTHER; note = 2'-O-methyluridine
  modified_base 28: mod_base = OTHER; note = 2'-O-methylguanosine
  modified_base 29: mod_base = OTHER; note = 2'-O-methyluridine
  modified_base 30: mod_base = OTHER; note = 2'-O-methyluridine
  modified_base 31: mod_base = OTHER; note = 2'-O-methylguanosine
  modified_base 32: mod_base = OTHER; note = 2'-O-methyluridine
  modified_base 33: mod_base = OTHER; note = 2'-O-methyluridine
  modified_base 34: mod_base = OTHER; note = 2'-O-methyladenosine
  modified_base 35: mod_base = OTHER; note = 2'-O-methyluridine
  modified_base 36: mod_base = OTHER; note = 2'-O-methyladenosine
  modified_base 37: mod_base = OTHER; note = 2'-O-methylguanosine
  modified_base 38: mod_base = OTHER; note = 2'-O-methyluridine
  modified_base 39: mod_base = OTHER; note = 2'-O-methyladenosine
  modified_base 40: mod_base = OTHER; note = 2'-O-methyluridine
  modified_base 41: mod_base = OTHER; note = 2'-O-methylcytidine
  modified_base 42: mod_base = OTHER; note = 2'-O-methylcytidine
  modified_base 43: mod_base = OTHER; note = 2'-O-methylcytidine
  modified_base 44: mod_base = OTHER; note = 2'-O-methyladenosine
  modified_base 45: mod_base = OTHER; note = 2'-O-methylcytidine
  modified_base 46: mod_base = OTHER; note = 2'-O-methylguanosine
  modified_base 47: mod_base = OTHER; note = 2'-O-methylcytidine
  modified_base 48: mod_base = OTHER; note = 2'-O-methyladenosine
  modified_base 49: mod_base = OTHER; note = 2'-O-methylcytidine
  modified_base 50: mod_base = OTHER; note = 2'-O-methyladenosine
  modified_base 51: mod_base = OTHER; note = 2'-O-methylguanosine
  modified_base 52: mod_base = OTHER; note = (R)-glycol adenosine
  modified_base 55: mod_base = OTHER; note = 2'-O-methyladenosine
  modified_base 56: mod_base = OTHER; note = 2'-O-methylguanosine
  modified_base 57: mod_base = OTHER; note = 2'-O-methyladenosine
  modified_base 58: mod_base = OTHER; note = 2'-O-methyluridine
  modified_base 59: mod_base = OTHER; note = 2'-O-methyladenosine phosphorothioate
  modified_base 60: mod_base = OTHER; note = 2'-O-methylguanosine phosphorothioate
  modified_base 61: mod_base = OTHER; note = 2'-O-methyladenosine phosphorothioate
  modified_base 62: mod_base = OTHER; note = 2'-O-methyladenosine phosphorothioate
  modified_base 63: mod_base = OTHER; note = 2'-O-methylguanosine
  misc_feature 1..52: note = RNA
  misc_feature 53..54: note = DNA
  misc_feature 55..63: note = RNA

SEQ ID NO: 161 - DNA, 63 bp, synthetic construct; identical to SEQ ID NO: 83
  source 1..63: mol_type = other DNA; note = Description of Artificial Sequence: Synthetic oligonucleotide; note = Description of Combined DNA/RNA Molecule: Synthetic oligonucleotide
  modified_base 1: mod_base = OTHER; note = 2'-O-methylguanosine phosphorothioate
  modified_base 2: mod_base = OTHER; note = 2'-O-methyluridine phosphorothioate
  modified_base 3: mod_base = OTHER; note = 2'-O-methylguanosine phosphorothioate
  modified_base 4: mod_base = OTHER; note = 2'-O-methylguanosine phosphorothioate
  modified_base 5: mod_base = OTHER; note = 2'-O-methyladenosine
  modified_base 6: mod_base = OTHER; note = 2'-O-methyladenosine
  modified_base 7: mod_base = OTHER; note = 2'-O-methyluridine
  modified_base 8: mod_base = OTHER; note = 2'-O-methyladenosine
  modified_base 9: mod_base = OTHER; note = 2'-O-methylguanosine
  modified_base 10: mod_base = OTHER; note = 2'-O-methyluridine
  modified_base 11: mod_base = OTHER; note = 2'-O-methyladenosine
  modified_base 12: mod_base = OTHER; note = 2'-O-methyluridine
  modified_base 13: mod_base = OTHER; note = 2'-O-methyladenosine
  modified_base 14: mod_base = OTHER; note = 2'-O-methyladenosine
  modified_base 15: mod_base = OTHER; note = 2'-O-methylcytidine
  modified_base 16: mod_base = OTHER; note = 2'-O-methyladenosine
  modified_base 17: mod_base = OTHER; note = 2'-O-methyladenosine
  modified_base 18: mod_base = OTHER; note = 2'-O-methyluridine
  modified_base 19: mod_base = OTHER; note = 2'-O-methyladenosine
  modified_base 20: mod_base = OTHER; note = 2'-O-methyluridine
  modified_base 21: mod_base = OTHER; note = 2'-O-methylguanosine
  modified_base 22: mod_base = OTHER; note = 2'-O-methylcytidine
  modified_base 23: mod_base = OTHER; note = 2'-O-methyluridine
  modified_base 24: mod_base = OTHER; note = 2'-O-methyladenosine
  modified_base 25: mod_base = OTHER; note = 2'-O-methyladenosine
  modified_base 26: mod_base = OTHER; note = 2'-O-methyladenosine
  modified_base 27: mod_base = OTHER; note = 2'-O-methyluridine
  modified_base 28: mod_base = OTHER; note = 2'-O-methylguanosine
  modified_base 29: mod_base = OTHER; note = 2'-O-methyluridine
  modified_base 30: mod_base = OTHER; note = 2'-O-methyluridine
  modified_base 31: mod_base = OTHER; note = 2'-O-methylguanosine
  modified_base 32: mod_base = OTHER; note = 2'-O-methyluridine
  modified_base 33: mod_base = OTHER; note = 2'-O-methyluridine
  modified_base 34: mod_base = OTHER; note = 2'-O-methyladenosine
  modified_base 35: mod_base = OTHER; note = 2'-O-methyluridine
  modified_base 36: mod_base = OTHER; note = 2'-O-methyladenosine
  modified_base 37: mod_base = OTHER; note = 2'-O-methylguanosine
  modified_base 38: mod_base = OTHER; note = 2'-O-methyluridine
  modified_base 39: mod_base = OTHER; note = 2'-O-methyladenosine
  modified_base 40: mod_base = OTHER; note = 2'-O-methyluridine
  modified_base 41: mod_base = OTHER; note = 2'-O-methylcytidine
  modified_base 42: mod_base = OTHER; note = 2'-O-methylcytidine
  modified_base 43: mod_base = OTHER; note = 2'-O-methylcytidine
  modified_base 44: mod_base = OTHER; note = 2'-O-methyladenosine
  modified_base 45: mod_base = OTHER; note = 2'-O-methylcytidine
  modified_base 46: mod_base = OTHER; note = 2'-O-methylguanosine
  modified_base 47: mod_base = OTHER; note = 2'-O-methylcytidine
  modified_base 48: mod_base = OTHER; note = 2'-O-methyladenosine
  modified_base 49: mod_base = OTHER; note = 2'-O-methylcytidine
  modified_base 50: mod_base = OTHER; note = 2'-O-methyladenosine
  modified_base 51: mod_base = OTHER; note = 2'-O-methylguanosine
  modified_base 53: mod_base = OTHER; note = (R)-glycol cytidine
  modified_base 55: mod_base = OTHER; note = 2'-O-methyladenosine
  modified_base 56: mod_base = OTHER; note = 2'-O-methylguanosine
  modified_base 57: mod_base = OTHER; note = 2'-O-methyladenosine
  modified_base 58: mod_base = OTHER; note = 2'-O-methyluridine
  modified_base 59: mod_base = OTHER; note = 2'-O-methyladenosine phosphorothioate
  modified_base 60: mod_base = OTHER; note = 2'-O-methylguanosine phosphorothioate
  modified_base 61: mod_base = OTHER; note = 2'-O-methyladenosine phosphorothioate
  modified_base 62: mod_base = OTHER; note = 2'-O-methyladenosine phosphorothioate
  modified_base 63: mod_base = OTHER; note = 2'-O-methylguanosine
  misc_feature 1..51: note = RNA
  misc_feature 52: note = DNA
  misc_feature 53: note = RNA
  misc_feature 54: note = DNA
  misc_feature 55..63: note = RNA

SEQ ID NO: 162 - DNA, 63 bp, synthetic construct; identical to SEQ ID NO: 83
  source 1..63: mol_type = other DNA; note = Description of Artificial Sequence: Synthetic oligonucleotide; note = Description of Combined DNA/RNA Molecule: Synthetic oligonucleotide
  modified_base 1: mod_base = OTHER; note = 2'-O-methylguanosine phosphorothioate
  modified_base 2: mod_base = OTHER; note = 2'-O-methyluridine phosphorothioate
  modified_base 3: mod_base = OTHER; note = 2'-O-methylguanosine phosphorothioate
  modified_base 4: mod_base = OTHER; note = 2'-O-methylguanosine phosphorothioate
  modified_base 5: mod_base = OTHER; note = 2'-O-methyladenosine
  modified_base 6: mod_base = OTHER; note = 2'-O-methyladenosine
  modified_base 7: mod_base = OTHER; note = 2'-O-methyluridine
  modified_base 8: mod_base = OTHER; note = 2'-O-methyladenosine
  modified_base 9: mod_base = OTHER; note = 2'-O-methylguanosine
  modified_base 10: mod_base = OTHER; note = 2'-O-methyluridine
  modified_base 11: mod_base = OTHER; note = 2'-O-methyladenosine
  modified_base 12: mod_base = OTHER; note = 2'-O-methyluridine
  modified_base 13: mod_base = OTHER; note = 2'-O-methyladenosine
  modified_base 14: mod_base = OTHER; note = 2'-O-methyladenosine
  modified_base 15: mod_base = OTHER; note = 2'-O-methylcytidine
  modified_base 16: mod_base = OTHER; note = 2'-O-methyladenosine
  modified_base 17: mod_base = OTHER; note = 2'-O-methyladenosine
  modified_base 18: mod_base = OTHER; note = 2'-O-methyluridine
  modified_base 19: mod_base = OTHER; note = 2'-O-methyladenosine
  modified_base 20: mod_base = OTHER; note = 2'-O-methyluridine
  modified_base 21: mod_base = OTHER; note = 2'-O-methylguanosine
  modified_base 22: mod_base = OTHER; note = 2'-O-methylcytidine
  modified_base 23: mod_base = OTHER; note = 2'-O-methyluridine
  modified_base 24: mod_base = OTHER; note = 2'-O-methyladenosine
  modified_base 25: mod_base = OTHER; note = 2'-O-methyladenosine
  modified_base 26: mod_base = OTHER; note = 2'-O-methyladenosine
  modified_base 27: mod_base = OTHER; note = 2'-O-methyluridine
  modified_base 28: mod_base = OTHER; note = 2'-O-methylguanosine
  modified_base 29: mod_base = OTHER; note = 2'-O-methyluridine
  modified_base 30: mod_base = OTHER; note = 2'-O-methyluridine
  modified_base 31: mod_base = OTHER; note = 2'-O-methylguanosine
  modified_base 32: mod_base = OTHER; note = 2'-O-methyluridine
  modified_base 33: mod_base = OTHER; note = 2'-O-methyluridine
  modified_base 34: mod_base = OTHER; note = 2'-O-methyladenosine
  modified_base 35: mod_base = OTHER; note = 2'-O-methyluridine
  modified_base 36: mod_base = OTHER; note = 2'-O-methyladenosine
  modified_base 37: mod_base = OTHER; note = 2'-O-methylguanosine
  modified_base 38: mod_base = OTHER; note = 2'-O-methyluridine
  modified_base 39: mod_base = OTHER; note = 2'-O-methyladenosine
  modified_base 40: mod_base = OTHER; note = 2'-O-methyluridine
  modified_base 41: mod_base = OTHER; note = 2'-O-methylcytidine
  modified_base 42: mod_base = OTHER; note = 2'-O-methylcytidine
  modified_base 43: mod_base = OTHER; note = 2'-O-methylcytidine
  modified_base 44: mod_base = OTHER; note = 2'-O-methyladenosine
  modified_base 45: mod_base = OTHER; note = 2'-O-methylcytidine
  modified_base 46: mod_base = OTHER; note = 2'-O-methylguanosine
  modified_base 47: mod_base = OTHER; note = 2'-O-methylcytidine
  modified_base 48: mod_base = OTHER; note = 2'-O-methyladenosine
  modified_base 49: mod_base = OTHER; note = 2'-O-methylcytidine
  modified_base 50: mod_base = OTHER; note = 2'-O-methyladenosine
  modified_base 51: mod_base = OTHER; note = 2'-O-methylguanosine
  modified_base 54: mod_base = OTHER; note = (R)-glycol cytidine
  modified_base 55: mod_base = OTHER; note = 2'-O-methyladenosine
  modified_base 56: mod_base = OTHER; note = 2'-O-methylguanosine
  modified_base 57: mod_base = OTHER; note = 2'-O-methyladenosine
  modified_base 58: mod_base = OTHER; note = 2'-O-methyluridine
  modified_base 59: mod_base = OTHER; note = 2'-O-methyladenosine phosphorothioate
  modified_base 60: mod_base = OTHER; note = 2'-O-methylguanosine phosphorothioate
  modified_base 61: mod_base = OTHER; note = 2'-O-methyladenosine phosphorothioate
  modified_base 62: mod_base = OTHER; note = 2'-O-methyladenosine phosphorothioate
  modified_base 63: mod_base = OTHER; note = 2'-O-methylguanosine
  misc_feature 1..51: note = RNA
  misc_feature 52..53: note = DNA
  misc_feature 54..63: note = RNA

SEQ ID NO: 163 - DNA, 63 bp, synthetic construct; identical to SEQ ID NO: 83
  source 1..63: mol_type = other DNA; note = Description of Artificial Sequence: Synthetic oligonucleotide; note = Description of Combined DNA/RNA Molecule: Synthetic oligonucleotide
  modified_base 1: mod_base = OTHER; note = 2'-O-methylguanosine phosphorothioate
  modified_base 2: mod_base = OTHER; note = 2'-O-methyluridine phosphorothioate
  modified_base 3: mod_base = OTHER; note = 2'-O-methylguanosine phosphorothioate
  modified_base 4: mod_base = OTHER; note = 2'-O-methylguanosine phosphorothioate
  modified_base 5: mod_base = OTHER; note = 2'-O-methyladenosine
  modified_base 6: mod_base = OTHER; note = 2'-O-methyladenosine
  modified_base 7: mod_base = OTHER; note = 2'-O-methyluridine
  modified_base 8: mod_base = OTHER; note = 2'-O-methyladenosine
  modified_base 9: mod_base = OTHER; note = 2'-O-methylguanosine
  modified_base 10: mod_base = OTHER; note = 2'-O-methyluridine
  modified_base 11: mod_base = OTHER; note = 2'-O-methyladenosine
  modified_base 12: mod_base = OTHER; note = 2'-O-methyluridine
  modified_base 13: mod_base = OTHER; note = 2'-O-methyladenosine
  modified_base 14: mod_base = OTHER; note = 2'-O-methyladenosine
  modified_base 15: mod_base = OTHER; note = 2'-O-methylcytidine
  modified_base 16: mod_base = OTHER; note = 2'-O-methyladenosine
  modified_base 17: mod_base = OTHER; note = 2'-O-methyladenosine
  modified_base 18: mod_base = OTHER; note = 2'-O-methyluridine
  modified_base 19: mod_base = OTHER; note = 2'-O-methyladenosine
  modified_base 20: mod_base = OTHER; note = 2'-O-methyluridine
  modified_base 21: mod_base = OTHER; note = 2'-O-methylguanosine
  modified_base 22: mod_base = OTHER; note = 2'-O-methylcytidine
  modified_base 23: mod_base = OTHER; note = 2'-O-methyluridine
  modified_base 24: mod_base = OTHER; note = 2'-O-methyladenosine
  modified_base 25: mod_base = OTHER; note = 2'-O-methyladenosine
  modified_base 26: mod_base = OTHER; note = 2'-O-methyladenosine
  modified_base 27: mod_base = OTHER; note = 2'-O-methyluridine
  modified_base 28: mod_base = OTHER; note = 2'-O-methylguanosine
  modified_base 29: mod_base = OTHER; note = 2'-O-methyluridine
  modified_base 30: mod_base = OTHER; note = 2'-O-methyluridine
  modified_base 31: mod_base = OTHER; note = 2'-O-methylguanosine
  modified_base 32: mod_base = OTHER; note = 2'-O-methyluridine
  modified_base 33: mod_base = OTHER; note = 2'-O-methyluridine
  modified_base 34: mod_base = OTHER; note = 2'-O-methyladenosine
  modified_base 35: mod_base = OTHER; note = 2'-O-methyluridine
  modified_base 36: mod_base = OTHER; note = 2'-O-methyladenosine
  modified_base 37: mod_base = OTHER; note = 2'-O-methylguanosine
  modified_base 38: mod_base = OTHER; note = 2'-O-methyluridine
  modified_base 39: mod_base = OTHER; note = 2'-O-methyladenosine
  modified_base 40: mod_base = OTHER; note = 2'-O-methyluridine
  modified_base 41: mod_base = OTHER; note = 2'-O-methylcytidine
  modified_base 42: mod_base = OTHER; note = 2'-O-methylcytidine
  modified_base 43: mod_base = OTHER; note = 2'-O-methylcytidine
  modified_base 44: mod_base = OTHER; note = 2'-O-methyladenosine
  modified_base 45: mod_base = OTHER; note = 2'-O-methylcytidine
  modified_base 46: mod_base = OTHER; note = 2'-O-methylguanosine
  modified_base 47: mod_base = OTHER; note = 2'-O-methylcytidine
  modified_base 48: mod_base = OTHER; note = 2'-O-methyladenosine
  modified_base 49: mod_base = OTHER; note = 2'-O-methylcytidine
  modified_base 50: mod_base = OTHER; note = 2'-O-methyladenosine
  modified_base 51: mod_base = OTHER; note = 2'-O-methylguanosine
  modified_base 52: mod_base = OTHER; note = Serinol adenosine
  modified_base 55: mod_base = OTHER; note = 2'-O-methyladenosine
  modified_base 56: mod_base = OTHER; note = 2'-O-methylguanosine
  modified_base 57: mod_base = OTHER; note = 2'-O-methyladenosine
  modified_base 58: mod_base = OTHER; note = 2'-O-methyluridine
  modified_base 59: mod_base = OTHER; note = 2'-O-methyladenosine phosphorothioate
  modified_base 60: mod_base = OTHER; note = 2'-O-methylguanosine phosphorothioate
  modified_base 61: mod_base = OTHER; note = 2'-O-methyladenosine phosphorothioate
  modified_base 62: mod_base = OTHER; note = 2'-O-methyladenosine phosphorothioate
  modified_base 63: mod_base = OTHER; note = 2'-O-methylguanosine
  misc_feature 1..52: note = RNA
  misc_feature 53..54: note = DNA
  misc_feature 55..63: note = RNA

SEQ ID NO: 164 - DNA, 63 bp, synthetic construct; identical to SEQ ID NO: 83
  source 1..63: mol_type = other DNA; note = Description of Artificial Sequence: Synthetic oligonucleotide; note = Description of Combined DNA/RNA Molecule: Synthetic oligonucleotide
  modified_base 1: mod_base = OTHER; note = 2'-O-methylguanosine phosphorothioate
  modified_base 2: mod_base = OTHER; note = 2'-O-methyluridine phosphorothioate
  modified_base 3: mod_base = OTHER; note = 2'-O-methylguanosine phosphorothioate
  modified_base 4: mod_base = OTHER; note = 2'-O-methylguanosine phosphorothioate
  modified_base 5: mod_base = OTHER; note = 2'-O-methyladenosine
  modified_base 6: mod_base = OTHER; note = 2'-O-methyladenosine
  modified_base 7: mod_base = OTHER; note = 2'-O-methyluridine
  modified_base 8: mod_base = OTHER; note = 2'-O-methyladenosine
  modified_base 9: mod_base = OTHER; note = 2'-O-methylguanosine
  modified_base 10: mod_base = OTHER; note = 2'-O-methyluridine
  modified_base 11: mod_base = OTHER; note = 2'-O-methyladenosine
  modified_base 12: mod_base = OTHER; note = 2'-O-methyluridine
  modified_base 13: mod_base = OTHER; note = 2'-O-methyladenosine
  modified_base 14: mod_base = OTHER; note = 2'-O-methyladenosine
  modified_base 15: mod_base = OTHER; note = 2'-O-methylcytidine
  modified_base 16: mod_base = OTHER; note = 2'-O-methyladenosine
  modified_base 17: mod_base = OTHER; note = 2'-O-methyladenosine
  modified_base 18: mod_base = OTHER; note = 2'-O-methyluridine
  modified_base 19: mod_base = OTHER; note = 2'-O-methyladenosine
  modified_base 20: mod_base = OTHER; note = 2'-O-methyluridine
  modified_base 21: mod_base = OTHER; note = 2'-O-methylguanosine
  modified_base 22: mod_base = OTHER; note = 2'-O-methylcytidine
  modified_base 23: mod_base = OTHER; note = 2'-O-methyluridine
  modified_base 24: mod_base = OTHER; note = 2'-O-methyladenosine
  modified_base 25: mod_base = OTHER; note = 2'-O-methyladenosine
  modified_base 26: mod_base = OTHER; note = 2'-O-methyladenosine
  modified_base 27: mod_base = OTHER; note = 2'-O-methyluridine
  modified_base 28: mod_base = OTHER; note = 2'-O-methylguanosine
  modified_base 29: mod_base = OTHER; note = 2'-O-methyluridine
  modified_base 30: mod_base = OTHER; note = 2'-O-methyluridine
  modified_base 31: mod_base = OTHER; note = 2'-O-methylguanosine
  modified_base 32: mod_base = OTHER; note = 2'-O-methyluridine
  modified_base 33: mod_base = OTHER; note = 2'-O-methyluridine
  modified_base 34: mod_base = OTHER; note = 2'-O-methyladenosine
  modified_base 35: mod_base = OTHER; note = 2'-O-methyluridine
  modified_base 36: mod_base = OTHER; note = 2'-O-methyladenosine
  modified_base 37: mod_base = OTHER; note = 2'-O-methylguanosine
  modified_base 38: mod_base = OTHER; note = 2'-O-methyluridine
  modified_base 39: mod_base = OTHER; note = 2'-O-methyladenosine
  modified_base 40: mod_base = OTHER; note = 2'-O-methyluridine
  modified_base 41: mod_base = OTHER; note = 2'-O-methylcytidine
  modified_base 42: mod_base = OTHER; note = 2'-O-methylcytidine
  modified_base 43: mod_base = OTHER; note = 2'-O-methylcytidine
  modified_base 44: mod_base = OTHER; note = 2'-O-methyladenosine
  modified_base 45: mod_base = OTHER; note = 2'-O-methylcytidine
  modified_base 46: mod_base = OTHER; note = 2'-O-methylguanosine
  modified_base 47: mod_base = OTHER; note = 2'-O-methylcytidine
  modified_base 48: mod_base = OTHER; note = 2'-O-methyladenosine
  modified_base 49: mod_base = OTHER; note = 2'-O-methylcytidine
  modified_base 50: mod_base = OTHER; note = 2'-O-methyladenosine
  modified_base 51: mod_base = OTHER; note = 2'-O-methylguanosine
  modified_base 53: mod_base = OTHER; note = Serinol cytidine
  modified_base 55: mod_base = OTHER; note = 2'-O-methyladenosine
  modified_base 56: mod_base = OTHER; note = 2'-O-methylguanosine
  modified_base 57: mod_base = OTHER; note = 2'-O-methyladenosine
  modified_base 58: mod_base = OTHER; note = 2'-O-methyluridine
  modified_base 59: mod_base = OTHER; note = 2'-O-methyladenosine phosphorothioate
  modified_base 60: mod_base = OTHER; note = 2'-O-methylguanosine phosphorothioate
  modified_base 61: mod_base = OTHER; note = 2'-O-methyladenosine phosphorothioate
  modified_base 62: mod_base = OTHER; note = 2'-O-methyladenosine phosphorothioate
  modified_base 63: mod_base = OTHER; note = 2'-O-methylguanosine
  misc_feature 1..51: note = RNA
  misc_feature 52: note = DNA
  misc_feature 53: note = RNA
  misc_feature 54: note = DNA
  misc_feature 55..63: note = RNA

SEQ ID NO: 165 - DNA, 63 bp, synthetic construct; identical to SEQ ID NO: 83
  source 1..63: mol_type = other DNA; note = Description of Artificial Sequence: Synthetic oligonucleotide; note = Description of Combined DNA/RNA Molecule: Synthetic oligonucleotide
  modified_base 1: mod_base = OTHER; note = 2'-O-methylguanosine phosphorothioate
  modified_base 2: mod_base = OTHER; note = 2'-O-methyluridine phosphorothioate
  modified_base 3: mod_base = OTHER; note = 2'-O-methylguanosine phosphorothioate
  modified_base 4: mod_base = OTHER; note = 2'-O-methylguanosine phosphorothioate
  modified_base 5: mod_base = OTHER; note = 2'-O-methyladenosine
  modified_base 6: mod_base = OTHER; note = 2'-O-methyladenosine
  modified_base 7: mod_base = OTHER; note = 2'-O-methyluridine
  modified_base 8: mod_base = OTHER; note = 2'-O-methyladenosine
  modified_base 9: mod_base = OTHER; note = 2'-O-methylguanosine
  modified_base 10: mod_base = OTHER; note = 2'-O-methyluridine
  modified_base 11: mod_base = OTHER; note = 2'-O-methyladenosine
  modified_base 12: mod_base = OTHER; note = 2'-O-methyluridine
  modified_base 13: mod_base = OTHER; note = 2'-O-methyladenosine
  modified_base 14: mod_base = OTHER; note = 2'-O-methyladenosine
  modified_base 15: mod_base = OTHER; note = 2'-O-methylcytidine
  modified_base 16: mod_base = OTHER; note = 2'-O-methyladenosine
  modified_base 17: mod_base = OTHER; note = 2'-O-methyladenosine
  modified_base 18: mod_base = OTHER; note = 2'-O-methyluridine
  modified_base 19: mod_base = OTHER; note = 2'-O-methyladenosine
  modified_base 20: mod_base = OTHER; note = 2'-O-methyluridine
  modified_base 21: mod_base = OTHER; note = 2'-O-methylguanosine
  modified_base 22: mod_base = OTHER; note = 2'-O-methylcytidine
  modified_base 23: mod_base = OTHER; note = 2'-O-methyluridine
  modified_base 24: mod_base = OTHER; note = 2'-O-methyladenosine
  modified_base 25: mod_base = OTHER; note = 2'-O-methyladenosine
  modified_base 26: mod_base = OTHER; note = 2'-O-methyladenosine
  modified_base 27: mod_base = OTHER; note = 2'-O-methyluridine
  modified_base 28: mod_base = OTHER; note = 2'-O-methylguanosine
  modified_base 29: mod_base = OTHER; note = 2'-O-methyluridine
  modified_base 30: mod_base = OTHER; note = 2'-O-methyluridine
  modified_base 31: mod_base = OTHER; note = 2'-O-methylguanosine
  modified_base 32: mod_base = OTHER; note = 2'-O-methyluridine
  modified_base 33: mod_base = OTHER; note = 2'-O-methyluridine
  modified_base 34: mod_base = OTHER; note = 2'-O-methyladenosine
  modified_base 35: mod_base = OTHER; note = 2'-O-methyluridine
  modified_base 36: mod_base = OTHER; note = 2'-O-methyladenosine
  modified_base 37: mod_base = OTHER; note = 2'-O-methylguanosine
  modified_base 38: mod_base = OTHER; note = 2'-O-methyluridine
  modified_base 39: mod_base = OTHER; note = 2'-O-methyladenosine
  modified_base 40: mod_base = OTHER; note = 2'-O-methyluridine
  modified_base 41: mod_base = OTHER; note = 2'-O-methylcytidine
  modified_base 42: mod_base = OTHER; note = 2'-O-methylcytidine
  modified_base 43: mod_base = OTHER; note = 2'-O-methylcytidine
  modified_base 44: mod_base = OTHER; note = 2'-O-methyladenosine
  modified_base 45: mod_base = OTHER; note = 2'-O-methylcytidine
  modified_base 46: mod_base = OTHER; note = 2'-O-methylguanosine
  modified_base 47: mod_base = OTHER; note = 2'-O-methylcytidine
  modified_base 48: mod_base = OTHER; note = 2'-O-methyladenosine
  modified_base 49: mod_base = OTHER; note = 2'-O-methylcytidine
  modified_base 50: mod_base = OTHER; note = 2'-O-methyladenosine
  modified_base 51: mod_base = OTHER; note = 2'-O-methylguanosine
  modified_base 54: mod_base = OTHER; note = Serinol cytidine
  modified_base 55: mod_base = OTHER; note = 2'-O-methyladenosine
  modified_base 56: mod_base = OTHER; note = 2'-O-methylguanosine
  modified_base 57: mod_base = OTHER; note = 2'-O-methyladenosine
  modified_base 58: mod_base = OTHER; note = 2'-O-methyluridine
  modified_base 59: mod_base = OTHER; note = 2'-O-methyladenosine phosphorothioate
  modified_base 60: mod_base = OTHER; note = 2'-O-methylguanosine phosphorothioate
  modified_base 61: mod_base = OTHER; note = 2'-O-methyladenosine phosphorothioate
  modified_base 62: mod_base = OTHER; note = 2'-O-methyladenosine phosphorothioate
  modified_base 63: mod_base = OTHER; note = 2'-O-methylguanosine
  misc_feature 1..51: note = RNA
  misc_feature 52..53: note = DNA
  misc_feature 54..63: note = RNA

SEQ ID NO: 166 - DNA, 63 bp, synthetic construct; identical to SEQ ID NO: 83
  source 1..63: mol_type = other DNA; note = Description of Artificial Sequence: Synthetic oligonucleotide; note = Description of Combined DNA/RNA Molecule: Synthetic oligonucleotide
  modified_base 1: mod_base = OTHER; note = 2'-O-methylguanosine phosphorothioate
  modified_base 2: mod_base = OTHER; note = 2'-O-methyluridine phosphorothioate
  modified_base 3: mod_base = OTHER; note = 2'-O-methylguanosine phosphorothioate
  modified_base 4: mod_base = OTHER; note = 2'-O-methylguanosine phosphorothioate
  modified_base 5: mod_base = OTHER; note = 2'-O-methyladenosine
  modified_base 6: mod_base = OTHER; note = 2'-O-methyladenosine
  modified_base 7: mod_base = OTHER; note = 2'-O-methyluridine
  modified_base 8: mod_base = OTHER; note = 2'-O-methyladenosine
  modified_base 9: mod_base = OTHER; note = 2'-O-methylguanosine
  modified_base 10: mod_base = OTHER; note = 2'-O-methyluridine
  modified_base 11: mod_base = OTHER; note = 2'-O-methyladenosine
  modified_base 12: mod_base = OTHER; note = 2'-O-methyluridine
  modified_base 13: mod_base = OTHER; note = 2'-O-methyladenosine
  modified_base 14: mod_base = OTHER; note = 2'-O-methyladenosine
  modified_base 15: mod_base = OTHER; note = 2'-O-methylcytidine
  modified_base 16: mod_base = OTHER; note = 2'-O-methyladenosine
  modified_base 17: mod_base = OTHER; note = 2'-O-methyladenosine
  modified_base 18: mod_base = OTHER; note = 2'-O-methyluridine
  modified_base 19: mod_base = OTHER; note = 2'-O-methyladenosine
  modified_base 20: mod_base = OTHER; note = 2'-O-methyluridine
  modified_base 21: mod_base = OTHER; note = 2'-O-methylguanosine
  modified_base 22: mod_base = OTHER; note = 2'-O-methylcytidine
  modified_base 23: mod_base = OTHER; note = 2'-O-methyluridine
  modified_base 24: mod_base = OTHER; note = 2'-O-methyladenosine
  modified_base 25: mod_base = OTHER; note = 2'-O-methyladenosine
  modified_base 26: mod_base = OTHER; note = 2'-O-methyladenosine
  modified_base 27: mod_base = OTHER; note = 2'-O-methyluridine
  modified_base 28: mod_base = OTHER; note = 2'-O-methylguanosine
  modified_base 29: mod_base = OTHER; note = 2'-O-methyluridine
  modified_base 30: mod_base = OTHER; note = 2'-O-methyluridine
  modified_base 31: mod_base = OTHER; note = 2'-O-methylguanosine
  modified_base 32: mod_base = OTHER; note = 2'-O-methyluridine
  modified_base 33: mod_base = OTHER; note = 2'-O-methyluridine
  modified_base 34: mod_base = OTHER; note = 2'-O-methyladenosine
  modified_base 35: mod_base = OTHER; note = 2'-O-methyluridine
  modified_base 36: mod_base = OTHER; note = 2'-O-methyladenosine
  modified_base 37: mod_base = OTHER; note = 2'-O-methylguanosine
  modified_base 38: mod_base = OTHER; note = 2'-O-methyluridine
  modified_base 39: mod_base = OTHER; note = 2'-O-methyladenosine
  modified_base 40: mod_base = OTHER; note = 2'-O-methyluridine
  modified_base 41: mod_base = OTHER; note = 2'-O-methylcytidine
  modified_base 42: mod_base = OTHER; note = 2'-O-methylcytidine
  modified_base 43: mod_base = OTHER; note = 2'-O-methylcytidine
  modified_base 44: mod_base = OTHER; note = 2'-O-methyladenosine
  modified_base 45: mod_base = OTHER; note = 2'-O-methylcytidine
  modified_base 46: mod_base = OTHER; note = 2'-O-methylguanosine
  modified_base 47: mod_base = OTHER; note = 2'-O-methylcytidine
  modified_base 48: mod_base = OTHER; note = 2'-O-methyladenosine
  modified_base 49: mod_base = OTHER; note = 2'-O-methylcytidine
  modified_base 50: mod_base = OTHER; note = 2'-O-methyladenosine
  modified_base 51: mod_base = OTHER; note = 2'-O-methylguanosine
  modified_base 52: mod_base = OTHER; note = Flexible adenosine
  modified_base 55: mod_base = OTHER; note = 2'-O-methyladenosine
  modified_base 56: mod_base = OTHER; note = 2'-O-methylguanosine
  modified_base 57: mod_base = OTHER; note = 2'-O-methyladenosine
  modified_base 58: mod_base = OTHER; note = 2'-O-methyluridine
  modified_base 59: mod_base = OTHER; note = 2'-O-methyladenosine phosphorothioate
  modified_base 60: mod_base = OTHER; note = 2'-O-methylguanosine phosphorothioate
  modified_base 61: mod_base = OTHER; note = 2'-O-methyladenosine phosphorothioate
  modified_base 62: mod_base = OTHER; note = 2'-O-methyladenosine phosphorothioate
  modified_base 63: mod_base = OTHER; note = 2'-O-methylguanosine
  misc_feature 1..52: note = RNA
  misc_feature 53..54: note = DNA
  misc_feature 55..63: note = RNA

SEQ ID NO: 167 - DNA, 63 bp, synthetic construct; identical to SEQ ID NO: 83
  source 1..63: mol_type = other DNA; note = Description of Artificial Sequence: Synthetic oligonucleotide; note = Description of Combined DNA/RNA Molecule: Synthetic oligonucleotide
  modified_base 1: mod_base = OTHER; note = 2'-O-methylguanosine phosphorothioate
  modified_base 2: mod_base = OTHER; note = 2'-O-methyluridine phosphorothioate
  modified_base 3: mod_base = OTHER; note = 2'-O-methylguanosine phosphorothioate
  modified_base 4: mod_base = OTHER; note = 2'-O-methylguanosine phosphorothioate
  modified_base 5: mod_base = OTHER; note = 2'-O-methyladenosine
  modified_base 6: mod_base = OTHER; note = 2'-O-methyladenosine
  modified_base 7: mod_base = OTHER; note = 2'-O-methyluridine
  modified_base 8: mod_base = OTHER; note = 2'-O-methyladenosine
  modified_base 9: mod_base = OTHER; note = 2'-O-methylguanosine
  modified_base 10: mod_base = OTHER; note = 2'-O-methyluridine
  modified_base 11: mod_base = OTHER; note = 2'-O-methyladenosine
  modified_base 12: mod_base = OTHER; note = 2'-O-methyluridine
  modified_base 13: mod_base = OTHER; note = 2'-O-methyladenosine
  modified_base 14: mod_base = OTHER; note = 2'-O-methyladenosine
  modified_base 15: mod_base = OTHER; note = 2'-O-methylcytidine
  modified_base 16: mod_base = OTHER; note = 2'-O-methyladenosine
  modified_base 17: mod_base = OTHER; note = 2'-O-methyladenosine
  modified_base 18: mod_base = OTHER; note = 2'-O-methyluridine
  modified_base 19: mod_base = OTHER; note = 2'-O-methyladenosine
  modified_base 20: mod_base = OTHER; note = 2'-O-methyluridine
  modified_base 21: mod_base = OTHER; note = 2'-O-methylguanosine
  modified_base 22: mod_base = OTHER; note = 2'-O-methylcytidine
  modified_base 23: mod_base = OTHER; note = 2'-O-methyluridine
  modified_base 24: mod_base = OTHER; note = 2'-O-methyladenosine
  modified_base 25: mod_base = OTHER; note = 2'-O-methyladenosine
  modified_base 26: mod_base = OTHER; note = 2'-O-methyladenosine
  modified_base 27: mod_base = OTHER; note = 2'-O-methyluridine
  modified_base 28: mod_base = OTHER; note = 2'-O-methylguanosine
  modified_base 29: mod_base = OTHER; note = 2'-O-methyluridine
  modified_base 30: mod_base = OTHER; note = 2'-O-methyluridine
  modified_base 31: mod_base = OTHER; note = 2'-O-methylguanosine
  modified_base 32: mod_base = OTHER; note = 2'-O-methyluridine
  modified_base 33: mod_base = OTHER; note = 2'-O-methyluridine
  modified_base 34: mod_base = OTHER; note = 2'-O-methyladenosine
  modified_base 35: mod_base = OTHER; note = 2'-O-methyluridine
  modified_base 36: mod_base = OTHER; note = 2'-O-methyladenosine
  modified_base 37: mod_base = OTHER; note = 2'-O-methylguanosine
  modified_base 38: mod_base = OTHER; note = 2'-O-methyluridine
  modified_base 39: mod_base = OTHER; note = 2'-O-methyladenosine
  modified_base 40: mod_base = OTHER; note = 2'-O-methyluridine
  modified_base 41: mod_base = OTHER; note = 2'-O-methylcytidine
  modified_base 42: mod_base = OTHER; note = 2'-O-methylcytidine
  modified_base 43: mod_base = OTHER; note = 2'-O-methylcytidine
  modified_base 44: mod_base = OTHER; note = 2'-O-methyladenosine
  modified_base 45: mod_base = OTHER; note = 2'-O-methylcytidine
  modified_base 46: mod_base = OTHER; note = 2'-O-methylguanosine
  modified_base 47: mod_base = OTHER; note = 2'-O-methylcytidine
  modified_base 48: mod_base = OTHER; note = 2'-O-methyladenosine
  modified_base 49: mod_base = OTHER; note = 2'-O-methylcytidine
  modified_base 50: mod_base = OTHER; note = 2'-O-methyladenosine
  modified_base 51: mod_base = OTHER; note = 2'-O-methylguanosine
  modified_base 53: mod_base = OTHER; note = Flexible cytidine
  modified_base 55: mod_base = OTHER; note = 2'-O-methyladenosine
  modified_base 56: mod_base = OTHER; note = 2'-O-methylguanosine
  modified_base 57: mod_base = OTHER; note = 2'-O-methyladenosine
  modified_base 58: mod_base = OTHER; note = 2'-O-methyluridine
  modified_base 59: mod_base = OTHER; note = 2'-O-methyladenosine phosphorothioate
  modified_base 60: mod_base = OTHER; note = 2'-O-methylguanosine phosphorothioate
  modified_base 61: mod_base = OTHER; note = 2'-O-methyladenosine phosphorothioate
  modified_base 62: mod_base = OTHER; note = 2'-O-methyladenosine phosphorothioate
  modified_base 63: mod_base = OTHER; note = 2'-O-methylguanosine
  misc_feature 1..51: note = RNA
  misc_feature 52: note = DNA
  misc_feature 53: note = RNA
  misc_feature 54: note = DNA
  misc_feature 55..63: note = RNA

SEQ ID NO: 168 - DNA, 63 bp, synthetic construct; identical to SEQ ID NO: 83
  source 1..63: mol_type = other DNA; note = Description of Artificial Sequence: Synthetic oligonucleotide; note = Description of Combined DNA/RNA Molecule: Synthetic oligonucleotide
  modified_base 1: mod_base = OTHER; note = 2'-O-methylguanosine phosphorothioate
  modified_base 2: mod_base = OTHER; note = 2'-O-methyluridine phosphorothioate
  modified_base 3: mod_base = OTHER; note = 2'-O-methylguanosine phosphorothioate
  modified_base 4: mod_base = OTHER; note = 2'-O-methylguanosine phosphorothioate
  modified_base 5: mod_base = OTHER; note = 2'-O-methyladenosine
  modified_base 6: mod_base = OTHER; note = 2'-O-methyladenosine
  modified_base 7: mod_base = OTHER; note = 2'-O-methyluridine
  modified_base 8: mod_base = OTHER; note = 2'-O-methyladenosine
  modified_base 9: mod_base = OTHER; note = 2'-O-methylguanosine
  modified_base 10: mod_base = OTHER; note = 2'-O-methyluridine
  modified_base 11: mod_base = OTHER; note = 2'-O-methyladenosine
  modified_base 12: mod_base = OTHER; note = 2'-O-methyluridine
  modified_base 13: mod_base = OTHER; note = 2'-O-methyladenosine
  modified_base 14: mod_base = OTHER; note = 2'-O-methyladenosine
  modified_base 15: mod_base = OTHER; note = 2'-O-methylcytidine
  modified_base 16: mod_base = OTHER; note = 2'-O-methyladenosine
  modified_base 17: mod_base = OTHER; note = 2'-O-methyladenosine
  modified_base 18: mod_base = OTHER; note = 2'-O-methyluridine
  modified_base 19: mod_base = OTHER; note = 2'-O-methyladenosine
  modified_base 20: mod_base = OTHER; note = 2'-O-methyluridine
  modified_base 21: mod_base = OTHER; note = 2'-O-methylguanosine
  modified_base 22: mod_base = OTHER; note = 2'-O-methylcytidine
  modified_base 23: mod_base = OTHER; note = 2'-O-methyluridine
  modified_base 24: mod_base = OTHER; note = 2'-O-methyladenosine
  modified_base 25: mod_base = OTHER; note = 2'-O-methyladenosine
  modified_base 26: mod_base = OTHER; note = 2'-O-methyladenosine
  modified_base 27: mod_base = OTHER; note = 2'-O-methyluridine
  modified_base 28: mod_base = OTHER; note = 2'-O-methylguanosine
  modified_base 29: mod_base = OTHER; note = 2'-O-methyluridine
  modified_base 30: mod_base = OTHER; note = 2'-O-methyluridine
  modified_base 31: mod_base = OTHER; note = 2'-O-methylguanosine
  modified_base 32: mod_base = OTHER; note = 2'-O-methyluridine
  modified_base 33: mod_base = OTHER; note = 2'-O-methyluridine
  modified_base 34: mod_base = OTHER; note = 2'-O-methyladenosine
  modified_base 35: mod_base = OTHER; note = 2'-O-methyluridine
  modified_base 36: mod_base = OTHER; note = 2'-O-methyladenosine
  modified_base 37: mod_base = OTHER; note = 2'-O-methylguanosine
  modified_base 38: mod_base = OTHER; note = 2'-O-methyluridine
  modified_base 39: mod_base = OTHER; note = 2'-O-methyladenosine
  modified_base 40: mod_base = OTHER; note = 2'-O-methyluridine
  modified_base 41: mod_base = OTHER; note = 2'-O-methylcytidine
  modified_base 42: mod_base = OTHER; note = 2'-O-methylcytidine
  modified_base 43: mod_base = OTHER; note = 2'-O-methylcytidine
  modified_base 44: mod_base = OTHER; note = 2'-O-methyladenosine
  modified_base 45: mod_base = OTHER; note = 2'-O-methylcytidine
  modified_base 46: mod_base = OTHER; note = 2'-O-methylguanosine
  modified_base 47: mod_base = OTHER; note = 2'-O-methylcytidine
  modified_base 48: mod_base = OTHER; note = 2'-O-methyladenosine
  modified_base 49: mod_base = OTHER; note = 2'-O-methylcytidine
  modified_base 50: mod_base = OTHER; note = 2'-O-methyladenosine
  modified_base 51: mod_base = OTHER; note = 2'-O-methylguanosine
  modified_base 54: mod_base = OTHER; note = Flexible cytidine
  modified_base 55: mod_base = OTHER; note = 2'-O-methyladenosine
  modified_base 56: mod_base = OTHER; note = 2'-O-methylguanosine
  modified_base 57: mod_base = OTHER; note = 2'-O-methyladenosine
  modified_base 58: mod_base = OTHER; note = 2'-O-methyluridine
  modified_base 59: mod_base = OTHER; note = 2'-O-methyladenosine phosphorothioate
  modified_base 60: mod_base = OTHER; note = 2'-O-methylguanosine phosphorothioate
  modified_base 61: mod_base = OTHER; note = 2'-O-methyladenosine phosphorothioate
  modified_base 62: mod_base = OTHER; note = 2'-O-methyladenosine phosphorothioate
  modified_base 63: mod_base = OTHER; note = 2'-O-methylguanosine
  misc_feature 1..51: note = RNA
  misc_feature 52..53: note = DNA
  misc_feature 54..63: note = RNA

SEQ ID NO: 169 - DNA, 63 bp, synthetic construct; identical to SEQ ID NO: 83
  source 1..63: mol_type = other DNA; note = Description of Artificial Sequence: Synthetic oligonucleotide; note = Description of Combined DNA/RNA Molecule: Synthetic oligonucleotide
  modified_base 1: mod_base = OTHER; note = 2'-O-methylguanosine phosphorothioate
  modified_base 2: mod_base = OTHER; note = 2'-O-methyluridine phosphorothioate
  modified_base 3: mod_base = OTHER; note = 2'-O-methylguanosine phosphorothioate
  modified_base 4: mod_base = OTHER; note = 2'-O-methylguanosine phosphorothioate
  modified_base 5: mod_base = OTHER; note = 2'-O-methyladenosine
  modified_base 6: mod_base = OTHER; note = 2'-O-methyladenosine
  modified_base 7: mod_base = OTHER; note = 2'-O-methyluridine
  modified_base 8: mod_base = OTHER; note = 2'-O-methyladenosine
  modified_base 9: mod_base = OTHER; note = 2'-O-methylguanosine
  modified_base 10: mod_base = OTHER; note = 2'-O-methyluridine
  modified_base 11: mod_base = OTHER; note = 2'-O-methyladenosine
  modified_base 12: mod_base = OTHER; note = 2'-O-methyluridine
  modified_base 13: mod_base = OTHER; note = 2'-O-methyladenosine
  modified_base 14: mod_base = OTHER; note = 2'-O-methyladenosine
  modified_base 15: mod_base = OTHER; note = 2'-O-methylcytidine
  modified_base 16: mod_base = OTHER; note = 2'-O-methyladenosine
  modified_base 17: mod_base = OTHER; note = 2'-O-methyladenosine
  modified_base 18: mod_base = OTHER; note = 2'-O-methyluridine
  modified_base 19: mod_base = OTHER; note = 2'-O-methyladenosine
  modified_base 20: mod_base = OTHER; note = 2'-O-methyluridine
  modified_base 21: mod_base = OTHER; note = 2'-O-methylguanosine
  modified_base 22: mod_base = OTHER; note = 2'-O-methylcytidine
  modified_base 23: mod_base = OTHER; note = 2'-O-methyluridine
  modified_base 24: mod_base = OTHER; note = 2'-O-methyladenosine
  modified_base 25: mod_base = OTHER; note = 2'-O-methyladenosine
  modified_base 26: mod_base = OTHER; note = 2'-O-methyladenosine
  modified_base 27: mod_base = OTHER; note = 2'-O-methyluridine
  modified_base 28: mod_base = OTHER; note = 2'-O-methylguanosine
  modified_base 29: mod_base = OTHER; note = 2'-O-methyluridine
  modified_base 30: mod_base = OTHER; note = 2'-O-methyluridine
  modified_base 31: mod_base = OTHER; note = 2'-O-methylguanosine
  modified_base 32: mod_base = OTHER; note = 2'-O-methyluridine
  modified_base 33: mod_base = OTHER; note = 2'-O-methyluridine
  modified_base 34: mod_base = OTHER; note = 2'-O-methyladenosine
  modified_base 35: mod_base = OTHER; note = 2'-O-methyluridine
  modified_base 36: mod_base = OTHER; note = 2'-O-methyladenosine
  modified_base 37: mod_base = OTHER; note = 2'-O-methylguanosine
  modified_base 38: mod_base = OTHER; note = 2'-O-methyluridine
  modified_base 39: mod_base = OTHER; note = 2'-O-methyladenosine
  modified_base 40: mod_base = OTHER; note = 2'-O-methyluridine
  modified_base 41: mod_base = OTHER; note = 2'-O-methylcytidine
  modified_base 42: mod_base = OTHER; note = 2'-O-methylcytidine
  modified_base 43: mod_base = OTHER; note = 2'-O-methylcytidine
  modified_base 44: mod_base = OTHER; note = 2'-O-methyladenosine
  modified_base 45: mod_base = OTHER; note = 2'-O-methylcytidine
  modified_base 46: mod_base = OTHER; note = 2'-O-methylguanosine
  modified_base 47: mod_base = OTHER; note = 2'-O-methylcytidine
  modified_base 48: mod_base = OTHER; note = 2'-O-methyladenosine
  modified_base 49: mod_base = OTHER; note = 2'-O-methylcytidine
  modified_base 50: mod_base = OTHER; note = 2'-O-methyladenosine
  modified_base 51: mod_base = OTHER; note = 2'-O-methylguanosine
  modified_base 52: mod_base = OTHER; note = Beta-D-hexitol adenine
  modified_base 55: mod_base = OTHER; note = 2'-O-methyladenosine
  modified_base 56: mod_base = OTHER; note = 2'-O-methylguanosine
  modified_base 57: mod_base = OTHER; note = 2'-O-methyladenosine
  modified_base 58: mod_base = OTHER; note = 2'-O-methyluridine
  modified_base 59: mod_base = OTHER; note = 2'-O-methyladenosine phosphorothioate
  modified_base 60: mod_base = OTHER; note = 2'-O-methylguanosine phosphorothioate
  modified_base 61: mod_base = OTHER; note = 2'-O-methyladenosine phosphorothioate
  modified_base 62: mod_base = OTHER; note = 2'-O-methyladenosine phosphorothioate
  modified_base 63: mod_base = OTHER; note = 2'-O-methylguanosine
  misc_feature 1..52: note = RNA
  misc_feature 53..54: note = DNA
  misc_feature 55..63: note = RNA

SEQ ID NO: 170 - DNA, 63 bp, synthetic construct; identical to SEQ ID NO: 83
  source 1..63: mol_type = other DNA; note = Description of Artificial Sequence: Synthetic oligonucleotide; note = Description of Combined DNA/RNA Molecule: Synthetic oligonucleotide
  modified_base 1: mod_base = OTHER; note = 2'-O-methylguanosine phosphorothioate
  modified_base 2: mod_base = OTHER; note = 2'-O-methyluridine phosphorothioate
  modified_base 3: mod_base = OTHER; note = 2'-O-methylguanosine phosphorothioate
  modified_base 4: mod_base = OTHER; note = 2'-O-methylguanosine phosphorothioate
  modified_base 5: mod_base = OTHER; note = 2'-O-methyladenosine
  modified_base 6: mod_base = OTHER; note = 2'-O-methyladenosine
  modified_base 7: mod_base = OTHER; note = 2'-O-methyluridine
  modified_base 8: mod_base = OTHER; note = 2'-O-methyladenosine
  modified_base 9: mod_base = OTHER; note = 2'-O-methylguanosine
  modified_base 10: mod_base = OTHER; note = 2'-O-methyluridine
  modified_base 11: mod_base = OTHER; note = 2'-O-methyladenosine
  modified_base 12: mod_base = OTHER; note = 2'-O-methyluridine
  modified_base 13: mod_base = OTHER; note = 2'-O-methyladenosine
  modified_base 14: mod_base = OTHER; note = 2'-O-methyladenosine
  modified_base 15: mod_base = OTHER; note = 2'-O-methylcytidine
  modified_base 16: mod_base = OTHER; note = 2'-O-methyladenosine
  modified_base 17: mod_base = OTHER; note = 2'-O-methyladenosine
  modified_base 18: mod_base = OTHER; note = 2'-O-methyluridine
  modified_base 19: mod_base = OTHER; note = 2'-O-methyladenosine
  modified_base 20: mod_base = OTHER; note = 2'-O-methyluridine
  modified_base 21: mod_base = OTHER; note = 2'-O-methylguanosine
  modified_base 22: mod_base = OTHER; note = 2'-O-methylcytidine
  modified_base 23: mod_base = OTHER; note = 2'-O-methyluridine
  modified_base 24: mod_base = OTHER; note = 2'-O-methyladenosine
  modified_base 25: mod_base = OTHER; note = 2'-O-methyladenosine
  modified_base 26: mod_base = OTHER; note = 2'-O-methyladenosine
  modified_base 27: mod_base = OTHER; note = 2'-O-methyluridine
  modified_base 28: mod_base = OTHER; note = 2'-O-methylguanosine
  modified_base 29: mod_base = OTHER; note = 2'-O-methyluridine
  modified_base 30: mod_base = OTHER; note = 2'-O-methyluridine
  modified_base 31: mod_base = OTHER; note = 2'-O-methylguanosine
  modified_base 32: mod_base = OTHER; note = 2'-O-methyluridine
  modified_base 33: mod_base = OTHER; note = 2'-O-methyluridine
  modified_base 34: mod_base = OTHER; note = 2'-O-methyladenosine
  modified_base 35: mod_base = OTHER; note = 2'-O-methyluridine
  modified_base 36: mod_base = OTHER; note = 2'-O-methyladenosine
  modified_base 37: mod_base = OTHER; note = 2'-O-methylguanosine
  modified_base 38: mod_base = OTHER; note = 2'-O-methyluridine
  modified_base 39: mod_base = OTHER; note = 2'-O-methyladenosine
  modified_base 40: mod_base = OTHER; note = 2'-O-methyluridine
  modified_base 41: mod_base = OTHER; note = 2'-O-methylcytidine
  modified_base 42: mod_base = OTHER; note = 2'-O-methylcytidine
  modified_base 43: mod_base = OTHER; note = 2'-O-methylcytidine
  modified_base 44: mod_base = OTHER; note = 2'-O-methyladenosine
  modified_base 45: mod_base = OTHER; note = 2'-O-methylcytidine
  modified_base 46: mod_base = OTHER; note = 2'-O-methylguanosine
  modified_base 47: mod_base = OTHER; note = 2'-O-methylcytidine
  modified_base 48: mod_base = OTHER; note = 2'-O-methyladenosine
  modified_base 49: mod_base = OTHER; note = 2'-O-methylcytidine
  modified_base 50: mod_base = OTHER; note = 2'-O-methyladenosine
  modified_base 51: mod_base = OTHER; note = 2'-O-methylguanosine
  modified_base 53: mod_base = OTHER; note = Beta-D-hexitol cytidine
  modified_base 55: mod_base = OTHER; note = 2'-O-methyladenosine
  modified_base 56: mod_base = OTHER; note = 2'-O-methylguanosine
  modified_base 57: mod_base = OTHER; note = 2'-O-methyladenosine
  modified_base 58: mod_base = OTHER; note = 2'-O-methyluridine
  modified_base 59: mod_base = OTHER; note = 2'-O-methyladenosine phosphorothioate
  modified_base 60: mod_base = OTHER; note = 2'-O-methylguanosine phosphorothioate
  modified_base 61: mod_base = OTHER; note = 2'-O-methyladenosine phosphorothioate
  modified_base 62: mod_base = OTHER; note = 2'-O-methyladenosine phosphorothioate
  modified_base 63: mod_base = OTHER; note = 2'-O-methylguanosine
  misc_feature 1..51: note = RNA
  misc_feature 52: note = DNA
  misc_feature 53: note = RNA
  misc_feature 54: note = DNA
  misc_feature 55..63: note = RNA

SEQ ID NO: 171 - DNA, 63 bp, synthetic construct; identical to SEQ ID NO: 83
  source 1..63: mol_type = other DNA; note = Description of Artificial Sequence: Synthetic oligonucleotide; note = Description of Combined DNA/RNA Molecule: Synthetic oligonucleotide
  modified_base 1: mod_base = OTHER; note = 2'-O-methylguanosine phosphorothioate
  modified_base 2: mod_base = OTHER; note = 2'-O-methyluridine phosphorothioate
  modified_base 3: mod_base = OTHER; note = 2'-O-methylguanosine phosphorothioate
  modified_base 4: mod_base = OTHER; note = 2'-O-methylguanosine phosphorothioate
  modified_base 5: mod_base = OTHER; note = 2'-O-methyladenosine
  modified_base 6: mod_base = OTHER; note = 2'-O-methyladenosine
  modified_base 7: mod_base = OTHER; note = 2'-O-methyluridine
  modified_base 8: mod_base = OTHER; note = 2'-O-methyladenosine
  modified_base 9: mod_base = OTHER; note = 2'-O-methylguanosine
  modified_base 10: mod_base = OTHER; note = 2'-O-methyluridine
  modified_base 11: mod_base = OTHER; note = 2'-O-methyladenosine
  modified_base 12: mod_base = OTHER; note = 2'-O-methyluridine
  modified_base 13: mod_base = OTHER; note = 2'-O-methyladenosine
  modified_base 14: mod_base = OTHER; note = 2'-O-methyladenosine
  modified_base 15: mod_base = OTHER; note = 2'-O-methylcytidine
  modified_base 16: mod_base = OTHER; note = 2'-O-methyladenosine
  modified_base 17: mod_base = OTHER; note = 2'-O-methyladenosine
  modified_base 18: mod_base = OTHER; note = 2'-O-methyluridine
  modified_base 19: mod_base = OTHER; note = 2'-O-methyladenosine
  modified_base 20: mod_base = OTHER; note = 2'-O-methyluridine
  modified_base 21: mod_base = OTHER; note = 2'-O-methylguanosine
  modified_base 22: mod_base = OTHER; note = 2'-O-methylcytidine
  modified_base 23: mod_base = OTHER; note = 2'-O-methyluridine
  modified_base 24: mod_base = OTHER; note = 2'-O-methyladenosine
  modified_base 25: mod_base = OTHER; note = 2'-O-methyladenosine
  modified_base 26: mod_base = OTHER; note = 2'-O-methyladenosine
  modified_base 27: mod_base = OTHER; note = 2'-O-methyluridine
  modified_base 28: mod_base = OTHER; note = 2'-O-methylguanosine
  modified_base 29: mod_base = OTHER; note = 2'-O-methyluridine
  modified_base 30: mod_base = OTHER; note = 2'-O-methyluridine
  modified_base 31: mod_base = OTHER; note = 2'-O-methylguanosine
  modified_base 32: mod_base = OTHER; note = 2'-O-methyluridine
  modified_base 33: mod_base = OTHER; note = 2'-O-methyluridine
  modified_base 34: mod_base = OTHER; note = 2'-O-methyladenosine
  modified_base 35: mod_base = OTHER; note = 2'-O-methyluridine
  modified_base 36: mod_base = OTHER; note = 2'-O-methyladenosine
  modified_base 37: mod_base = OTHER; note = 2'-O-methylguanosine
  modified_base 38: mod_base = OTHER; note = 2'-O-methyluridine
  modified_base 39: mod_base = OTHER; note = 2'-O-methyladenosine
  modified_base 40: mod_base = OTHER; note = 2'-O-methyluridine
  modified_base 41: mod_base = OTHER; note = 2'-O-methylcytidine
  modified_base 42: mod_base = OTHER; note = 2'-O-methylcytidine
  modified_base 43: mod_base = OTHER; note = 2'-O-methylcytidine
  modified_base 44: mod_base = OTHER; note = 2'-O-methyladenosine
  modified_base 45: mod_base = OTHER; note = 2'-O-methylcytidine
  modified_base 46: mod_base = OTHER; note = 2'-O-methylguanosine
  modified_base 47: mod_base = OTHER; note = 2'-O-methylcytidine
  modified_base 48: mod_base = OTHER; note = 2'-O-methyladenosine
  modified_base 49: mod_base = OTHER; note = 2'-O-methylcytidine
  modified_base 50: mod_base = OTHER; note = 2'-O-methyladenosine
  modified_base 51: mod_base = OTHER; note = 2'-O-methylguanosine
  modified_base 54: mod_base = OTHER; note = Beta-D-hexitol cytidine
  modified_base 55: mod_base = OTHER; note = 2'-O-methyladenosine
  modified_base 56: mod_base = OTHER; note = 2'-O-methylguanosine
  modified_base 57: mod_base = OTHER; note = 2'-O-methyladenosine
  modified_base 58: mod_base = OTHER; note = 2'-O-methyluridine
  modified_base 59: mod_base = OTHER; note = 2'-O-methyladenosine phosphorothioate
  modified_base 60: mod_base = OTHER; note = 2'-O-methylguanosine phosphorothioate
  modified_base 61: mod_base = OTHER; note = 2'-O-methyladenosine phosphorothioate
  modified_base 62: mod_base = OTHER; note = 2'-O-methyladenosine phosphorothioate
  modified_base 63: mod_base = OTHER; note = 2'-O-methylguanosine
  misc_feature 1..51: note = RNA
  misc_feature 52..53: note = DNA
  misc_feature 54..63: note = RNA

SEQ ID NO: 172 - DNA, 63 bp, synthetic construct
  source 1..63: mol_type = other DNA; note = Description of Artificial Sequence: Synthetic oligonucleotide; note = Description of Combined DNA/RNA Molecule: Synthetic oligonucleotide
  modified_base 1: mod_base = OTHER; note = 2'-O-methylguanosine phosphorothioate
  modified_base 2: mod_base = OTHER; note = 2'-O-methyluridine phosphorothioate
  modified_base 3: mod_base = OTHER; note = 2'-O-methylguanosine phosphorothioate
  modified_base 4: mod_base = OTHER; note = 2'-O-methylguanosine phosphorothioate
  modified_base 5: mod_base = OTHER; note = 2'-O-methyladenosine
  modified_base 6: mod_base = OTHER; note = 2'-O-methyladenosine
  modified_base 7: mod_base = OTHER; note = 2'-O-methyluridine
  modified_base 8: mod_base = OTHER; note = 2'-O-methyladenosine
  modified_base 9: mod_base = OTHER; note = 2'-O-methylguanosine
  modified_base 10: mod_base = OTHER; note = 2'-O-methyluridine
  modified_base 11: mod_base = OTHER; note = 2'-O-methyladenosine
  modified_base 12: mod_base = OTHER; note = 2'-O-methyluridine
  modified_base 13: mod_base = OTHER; note = 2'-O-methyladenosine
  modified_base 14: mod_base = OTHER; note = 2'-O-methyladenosine
  modified_base 15: mod_base = OTHER; note = 2'-O-methylcytidine
  modified_base 16: mod_base = OTHER; note = 2'-O-methyladenosine
  modified_base 17: mod_base = OTHER; note = 2'-O-methyladenosine
  modified_base 18: mod_base = OTHER; note = 2'-O-methyluridine
  modified_base 19: mod_base = OTHER; note = 2'-O-methyladenosine
  modified_base 20: mod_base = OTHER; note = 2'-O-methyluridine
  modified_base 21: mod_base = OTHER; note = 2'-O-methylguanosine
  modified_base 22: mod_base = OTHER; note = 2'-O-methylcytidine
  modified_base 23: mod_base = OTHER; note = 2'-O-methyluridine
  modified_base 24: mod_base = OTHER; note = 2'-O-methyladenosine
  modified_base 25: mod_base = OTHER; note = 2'-O-methyladenosine
  modified_base 26: mod_base = OTHER; note = 2'-O-methyladenosine
  modified_base 27: mod_base = OTHER; note = 2'-O-methyluridine
  modified_base 28: mod_base = OTHER; note = 2'-O-methylguanosine
  modified_base 29: mod_base = OTHER; note = 2'-O-methyluridine
  modified_base 30: mod_base = OTHER; note = 2'-O-methyluridine
  modified_base 31: mod_base = OTHER; note = 2'-O-methylguanosine
  modified_base 32: mod_base = OTHER; note = 2'-O-methyluridine
  modified_base 33: mod_base = OTHER; note = 2'-O-methyluridine
  modified_base 34: mod_base = OTHER; note = 2'-O-methyladenosine
  modified_base 35: mod_base = OTHER; note = 2'-O-methyluridine
  modified_base 36: mod_base = OTHER; note = 2'-O-methyladenosine
  modified_base 37: mod_base = OTHER; note = 2'-O-methylguanosine
  modified_base 38: mod_base = OTHER; note = 2'-O-methyluridine
  modified_base 39: mod_base = OTHER; note = 2'-O-methyladenosine
  modified_base 40: mod_base = OTHER; note = 2'-O-methyluridine
  modified_base 41: mod_base = OTHER; note = 2'-O-methylcytidine
  modified_base 42: mod_base = OTHER; note = 2'-O-methylcytidine
  modified_base 43: mod_base = OTHER; note = 2'-O-methylcytidine
  modified_base 44: mod_base = OTHER; note = 2'-O-methyladenosine
  modified_base 45: mod_base = OTHER; note = 2'-O-methylcytidine
  modified_base 46: mod_base = OTHER; note = 2'-O-methylguanosine
  modified_base 47: mod_base = OTHER; note = 2'-O-methylcytidine
  modified_base 48: mod_base = OTHER; note = 2'-O-methyladenosine
  modified_base 49: mod_base = OTHER; note = 2'-O-methylcytidine
  modified_base 50: mod_base = OTHER; note = 2'-O-methyladenosine
  modified_base 51: mod_base = OTHER; note = 2'-O-methylguanosine
  modified_base 52: mod_base = OTHER; note = Inosine
  modified_base 55: mod_base = OTHER; note = 2'-O-methyladenosine
  modified_base 56: mod_base = OTHER; note = 2'-O-methylguanosine
  modified_base 57: mod_base = OTHER; note = 2'-O-methyladenosine
  modified_base 58: mod_base = OTHER; note = 2'-O-methyluridine
  modified_base 59: mod_base = OTHER; note = 2'-O-methyladenosine phosphorothioate
  modified_base 60: mod_base = OTHER; note = 2'-O-methylguanosine phosphorothioate
  modified_base 61: mod_base = OTHER; note = 2'-O-methyladenosine phosphorothioate
  modified_base 62: mod_base = OTHER; note = 2'-O-methyladenosine phosphorothioate
  modified_base 63: mod_base = OTHER; note = 2'-O-methylguanosine
  misc_feature 1..51: note = RNA
  misc_feature 52..54: note = DNA
  misc_feature 55..63: note = RNA
gtggaatagtataacaatatgctaaatgttgttatagtatcccacgcacagnccagatagaag

SEQ ID NO: 173 - DNA, 63 bp, synthetic construct; identical to SEQ ID NO: 154
  source 1..63: mol_type = other DNA; note = Description of Artificial Sequence: Synthetic oligonucleotide; note = Description of Combined DNA/RNA Molecule: Synthetic oligonucleotide
  modified_base 1: mod_base = OTHER; note = 2'-O-methylguanosine phosphorothioate
  modified_base 2: mod_base = OTHER; note = 2'-O-methyluridine phosphorothioate
  modified_base 3: mod_base = OTHER; note = 2'-O-methylguanosine phosphorothioate
  modified_base 4: mod_base = OTHER; note = 2'-O-methylguanosine phosphorothioate
  modified_base 5: mod_base = OTHER; note = 2'-O-methyladenosine
  modified_base 6: mod_base = OTHER; note = 2'-O-methyladenosine
  modified_base 7: mod_base = OTHER; note = 2'-O-methyluridine
  modified_base 8: mod_base = OTHER; note = 2'-O-methyladenosine
  modified_base 9: mod_base = OTHER; note = 2'-O-methylguanosine
  modified_base 10: mod_base = OTHER; note = 2'-O-methyluridine
  modified_base 11: mod_base = OTHER; note = 2'-O-methyladenosine
  modified_base 12: mod_base = OTHER; note = 2'-O-methyluridine
  modified_base 13: mod_base = OTHER; note = 2'-O-methyladenosine
  modified_base 14: mod_base = OTHER; note = 2'-O-methyladenosine
  modified_base 15: mod_base = OTHER; note = 2'-O-methylcytidine
  modified_base 16: mod_base = OTHER; note = 2'-O-methyladenosine
  modified_base 17: mod_base = OTHER; note = 2'-O-methyladenosine
  modified_base 18: mod_base = OTHER; note = 2'-O-methyluridine
  modified_base 19: mod_base = OTHER; note = 2'-O-methyladenosine
  modified_base 20: mod_base = OTHER; note = 2'-O-methyluridine
  modified_base 21: mod_base = OTHER; note = 2'-O-methylguanosine
  modified_base 22: mod_base = OTHER; note = 2'-O-methylcytidine
  modified_base 23: mod_base = OTHER; note = 2'-O-methyluridine
  modified_base 24: mod_base = OTHER; note = 2'-O-methyladenosine
  modified_base 25: mod_base = OTHER; note = 2'-O-methyladenosine
  modified_base 26: mod_base = OTHER; note = 2'-O-methyladenosine
  modified_base 27: mod_base = OTHER; note = 2'-O-methyluridine
  modified_base 28: mod_base = OTHER; note = 2'-O-methylguanosine
  modified_base 29: mod_base = OTHER; note = 2'-O-methyluridine
  modified_base 30: mod_base = OTHER; note = 2'-O-methyluridine
  modified_base 31: mod_base = OTHER; note = 2'-O-methylguanosine
  modified_base 32: mod_base = OTHER; note = 2'-O-methyluridine
  modified_base 33: mod_base = OTHER; note = 2'-O-methyluridine
  modified_base 34: mod_base = OTHER; note = 2'-O-methyladenosine
  modified_base 35: mod_base = OTHER; note = 2'-O-methyluridine
  modified_base 36: mod_base = OTHER; note = 2'-O-methyladenosine
  modified_base 37: mod_base = OTHER; note = 2'-O-methylguanosine
  modified_base 38: mod_base = OTHER; note = 2'-O-methyluridine
  modified_base 39: mod_base = OTHER; note = 2'-O-methyladenosine
  modified_base 40: mod_base = OTHER; note = 2'-O-methyluridine
  modified_base 41: mod_base = OTHER; note = 2'-O-methylcytidine
  modified_base 42: mod_base = OTHER; note = 2'-O-methylcytidine
  modified_base 43: mod_base = OTHER; note = 2'-O-methylcytidine
  modified_base 44: mod_base = OTHER; note = 2'-O-methyladenosine
  modified_base 45: mod_base = OTHER; note = 2'-O-methylcytidine
  modified_base 46: mod_base = OTHER; note = 2'-O-methylguanosine
  modified_base 47: mod_base = OTHER; note = 2'-O-methylcytidine
  modified_base 48: mod_base = OTHER; note = 2'-O-methyladenosine
  modified_base 49: mod_base = OTHER; note = 2'-O-methylcytidine
  modified_base 50: mod_base = OTHER; note = 2'-O-methyladenosine
  modified_base 51: mod_base = OTHER; note = 2'-O-methylguanosine
  modified_base 53: mod_base = OTHER; note = Inosine
  modified_base 55: mod_base = OTHER; note = 2'-O-methyladenosine
  modified_base 56: mod_base = OTHER; note = 2'-O-methylguanosine
  modified_base 57: mod_base = OTHER; note = 2'-O-methyladenosine
  modified_base 58: mod_base = OTHER; note = 2'-O-methyluridine
  modified_base 59: mod_base = OTHER; note = 2'-O-methyladenosine phosphorothioate
  modified_base 60: mod_base = OTHER; note = 2'-O-methylguanosine phosphorothioate
  modified_base 61: mod_base = OTHER; note = 2'-O-methyladenosine phosphorothioate
  modified_base 62: mod_base = OTHER; note = 2'-O-methyladenosine phosphorothioate
  modified_base 63: mod_base = OTHER; note = 2'-O-methylguanosine
  misc_feature 1..51: note = RNA
  misc_feature 52..54: note = DNA
  misc_feature 55..63: note = RNA

SEQ ID NO: 174 - DNA, 63 bp, synthetic construct
  source 1..63: mol_type = other DNA; note = Description of Artificial Sequence: Synthetic oligonucleotide; note = Description of Combined DNA/RNA Molecule: Synthetic oligonucleotide
  modified_base 1: mod_base = OTHER; note = 2'-O-methylguanosine phosphorothioate
  modified_base 2: mod_base = OTHER; note = 2'-O-methyluridine phosphorothioate
  modified_base 3: mod_base = OTHER; note = 2'-O-methylguanosine phosphorothioate
  modified_base 4: mod_base = OTHER; note = 2'-O-methylguanosine phosphorothioate
  modified_base 5: mod_base = OTHER; note = 2'-O-methyladenosine
  modified_base 6: mod_base = OTHER; note = 2'-O-methyladenosine
  modified_base 7: mod_base = OTHER; note = 2'-O-methyluridine
  modified_base 8: mod_base = OTHER; note = 2'-O-methyladenosine
  modified_base 9: mod_base = OTHER; note = 2'-O-methylguanosine
  modified_base 10: mod_base = OTHER; note = 2'-O-methyluridine
  modified_base 11: mod_base = OTHER; note = 2'-O-methyladenosine
  modified_base 12: mod_base = OTHER; note = 2'-O-methyluridine
  modified_base 13: mod_base = OTHER; note = 2'-O-methyladenosine
  modified_base 14: mod_base = OTHER; note = 2'-O-methyladenosine
  modified_base 15: mod_base = OTHER; note = 2'-O-methylcytidine
  modified_base 16: mod_base = OTHER; note = 2'-O-methyladenosine
  modified_base 17: mod_base = OTHER; note = 2'-O-methyladenosine
  modified_base 18: mod_base = OTHER; note = 2'-O-methyluridine
  modified_base 19: mod_base = OTHER; note = 2'-O-methyladenosine
  modified_base 20: mod_base = OTHER; note = 2'-O-methyluridine
  modified_base 21: mod_base = OTHER; note = 2'-O-methylguanosine
  modified_base 22: mod_base = OTHER; note = 2'-O-methylcytidine
  modified_base 23: mod_base = OTHER; note = 2'-O-methyluridine
  modified_base 24: mod_base = OTHER; note = 2'-O-methyladenosine
  modified_base 25: mod_base = OTHER; note = 2'-O-methyladenosine
  modified_base 26: mod_base = OTHER; note = 2'-O-methyladenosine
  modified_base 27: mod_base = OTHER; note = 2'-O-methyluridine
  modified_base 28: mod_base = OTHER; note = 2'-O-methylguanosine
  modified_base 29: mod_base = OTHER; note = 2'-O-methyluridine
  modified_base 30: mod_base = OTHER; note = 2'-O-methyluridine
  modified_base 31: mod_base = OTHER; note = 2'-O-methylguanosine
  modified_base 32: mod_base = OTHER; note = 2'-O-methyluridine
  modified_base 33: mod_base = OTHER; note = 2'-O-methyluridine
  modified_base 34: mod_base = OTHER; note = 2'-O-methyladenosine
  modified_base 35: mod_base = OTHER; note = 2'-O-methyluridine
  modified_base 36: mod_base = OTHER; note = 2'-O-methyladenosine
  modified_base 37: mod_base = OTHER; note = 2'-O-methylguanosine
  modified_base 38: mod_base = OTHER; note = 2'-O-methyluridine
  modified_base 39: mod_base = OTHER; note = 2'-O-methyladenosine
  modified_base 40: mod_base = OTHER; note = 2'-O-methyluridine
  modified_base 41: mod_base = OTHER; note = 2'-O-methylcytidine
  modified_base 42: mod_base = OTHER; note = 2'-O-methylcytidine
  modified_base 43: mod_base = OTHER; note = 2'-O-methylcytidine
  modified_base 44: mod_base = OTHER; note = 2'-O-methyladenosine
  modified_base 45: mod_base = OTHER; note = 2'-O-methylcytidine
  modified_base 46: mod_base = OTHER; note = 2'-O-methylguanosine
  modified_base 47: mod_base = OTHER; note = 2'-O-methylcytidine
  modified_base 48: mod_base = OTHER; note = 2'-O-methyladenosine
  modified_base 49: mod_base = OTHER; note = 2'-O-methylcytidine
  modified_base 50: mod_base = OTHER; note = 2'-O-methyladenosine
  modified_base 51: mod_base = OTHER; note = 2'-O-methylguanosine
  modified_base 54: mod_base = OTHER; note = Inosine
  modified_base 55: mod_base = OTHER; note = 2'-O-methyladenosine
  modified_base 56: mod_base = OTHER; note = 2'-O-methylguanosine
  modified_base 57: mod_base = OTHER; note = 2'-O-methyladenosine
  modified_base 58: mod_base = OTHER; note = 2'-O-methyluridine
  modified_base 59: mod_base = OTHER; note = 2'-O-methyladenosine phosphorothioate
  modified_base 60: mod_base = OTHER; note = 2'-O-methylguanosine phosphorothioate
  modified_base 61: mod_base = OTHER; note = 2'-O-methyladenosine phosphorothioate
  modified_base 62: mod_base = OTHER; note = 2'-O-methyladenosine phosphorothioate
  modified_base 63: mod_base = OTHER; note = 2'-O-methylguanosine
  misc_feature 1..51: note = RNA
  misc_feature 52..54: note = DNA
  misc_feature 55..63: note = RNA
gtggaatagtataacaatatgctaaatgttgttatagtatcccacgcacagacnagatagaag

SEQ ID NO: 175 - DNA, 63 bp, synthetic construct
  source 1..63: mol_type = other DNA; note = Description of Artificial Sequence: Synthetic oligonucleotide; note = Description of Combined DNA/RNA Molecule: Synthetic oligonucleotide
  modified_base 1: mod_base = OTHER; note = 2'-O-methylguanosine phosphorothioate
  modified_base 2: mod_base = OTHER; note = 2'-O-methyluridine phosphorothioate
  modified_base 3: mod_base = OTHER; note = 2'-O-methylguanosine phosphorothioate
  modified_base 4: mod_base = OTHER; note = 2'-O-methylguanosine phosphorothioate
  modified_base 5: mod_base = OTHER; note = 2'-O-methyladenosine
  modified_base 6: mod_base = OTHER; note = 2'-O-methyladenosine
  modified_base 7: mod_base = OTHER; note = 2'-O-methyluridine
  modified_base 8: mod_base = OTHER; note = 2'-O-methyladenosine
  modified_base 9: mod_base = OTHER; note = 2'-O-methylguanosine
  modified_base 10: mod_base = OTHER; note = 2'-O-methyluridine
  modified_base 11: mod_base = OTHER; note = 2'-O-methyladenosine
  modified_base 12: mod_base = OTHER; note = 2'-O-methyluridine
  modified_base 13: mod_base = OTHER; note = 2'-O-methyladenosine
  modified_base 14: mod_base = OTHER; note = 2'-O-methyladenosine
  modified_base 15: mod_base = OTHER; note = 2'-O-methylcytidine
  modified_base 16: mod_base = OTHER; note = 2'-O-methyladenosine
  modified_base 17: mod_base = OTHER; note = 2'-O-methyladenosine
  modified_base 18: mod_base = OTHER; note = 2'-O-methyluridine
  modified_base 19: mod_base = OTHER; note = 2'-O-methyladenosine
  modified_base 20: mod_base = OTHER; note = 2'-O-methyluridine
  modified_base 21: mod_base = OTHER; note = 2'-O-methylguanosine
  modified_base 22: mod_base = OTHER; note = 2'-O-methylcytidine
  modified_base 23: mod_base = OTHER; note = 2'-O-methyluridine
  modified_base 24: mod_base = OTHER; note = 2'-O-methyladenosine
  modified_base 25: mod_base = OTHER; note = 2'-O-methyladenosine
  modified_base 26: mod_base = OTHER; note = 2'-O-methyladenosine
  modified_base 27: mod_base = OTHER; note = 2'-O-methyluridine
  modified_base 28: mod_base = OTHER; note = 2'-O-methylguanosine
  modified_base 29: mod_base = OTHER; note = 2'-O-methyluridine
  modified_base 30: mod_base = OTHER; note = 2'-O-methyluridine
  modified_base 31: mod_base = OTHER; note = 2'-O-methylguanosine
  modified_base 32: mod_base = OTHER; note = 2'-O-methyluridine
  modified_base 33: mod_base = OTHER; note = 2'-O-methyluridine
  modified_base 34: mod_base = OTHER; note = 2'-O-methyladenosine
  modified_base 35: mod_base = OTHER; note = 2'-O-methyluridine
  modified_base 36: mod_base = OTHER; note = 2'-O-methyladenosine
  modified_base 37: mod_base = OTHER; note = 2'-O-methylguanosine
  modified_base 38: mod_base = OTHER; note = 2'-O-methyluridine
  modified_base 39: mod_base = OTHER; note = 2'-O-methyladenosine
  modified_base 40: mod_base = OTHER; note = 2'-O-methyluridine
  modified_base 41: mod_base = OTHER; note = 2'-O-methylcytidine
  modified_base 42: mod_base = OTHER; note = 2'-O-methylcytidine
  modified_base 43: mod_base = OTHER; note = 2'-O-methylcytidine
  modified_base 44: mod_base = OTHER; note = 2'-O-methyladenosine
  modified_base 45: mod_base = OTHER; note = 2'-O-methylcytidine
  modified_base 46: mod_base = OTHER; note = 2'-O-methylguanosine
  modified_base 47: mod_base = OTHER; note = 2'-O-methylcytidine
  modified_base 48: mod_base = OTHER; note = 2'-O-methyladenosine
  modified_base 49: mod_base = OTHER; note = 2'-O-methylcytidine
  modified_base 50: mod_base = OTHER; note = 2'-O-methyladenosine
  modified_base 51: mod_base = OTHER; note = 2'-O-methylguanosine
  modified_base 52: mod_base = OTHER; note = Inosine
  modified_base 53: mod_base = OTHER; note = Inosine
  modified_base 55: mod_base = OTHER; note = 2'-O-methyladenosine
  modified_base 56: mod_base = OTHER; note = 2'-O-methylguanosine
  modified_base 57: mod_base = OTHER; note = 2'-O-methyladenosine
  modified_base 58: mod_base = OTHER; note = 2'-O-methyluridine
  modified_base 59: mod_base = OTHER; note = 2'-O-methyladenosine phosphorothioate
  modified_base 60: mod_base = OTHER; note = 2'-O-methylguanosine phosphorothioate
  modified_base 61: mod_base = OTHER; note = 2'-O-methyladenosine phosphorothioate
  modified_base 62: mod_base = OTHER; note = 2'-O-methyladenosine phosphorothioate
  modified_base 63: mod_base = OTHER; note = 2'-O-methylguanosine
  misc_feature 1..51: note = RNA
  misc_feature 52..54: note = DNA
  misc_feature 55..63: note = RNA
gtggaatagtataacaatatgctaaatgttgttatagtatcccacgcacagnncagatagaag

SEQ ID NO: 176 - DNA, 63 bp, synthetic construct
  source 1..63: mol_type = other DNA; note = Description of Artificial Sequence: Synthetic oligonucleotide; note = Description of Combined DNA/RNA Molecule: Synthetic oligonucleotide
  modified_base 1: mod_base = OTHER; note = 2'-O-methylguanosine phosphorothioate
  modified_base 2: mod_base = OTHER; note = 2'-O-methyluridine phosphorothioate
  modified_base 3: mod_base = OTHER; note = 2'-O-methylguanosine phosphorothioate
  modified_base 4: mod_base = OTHER; note = 2'-O-methylguanosine phosphorothioate
  modified_base 5: mod_base = OTHER; note = 2'-O-methyladenosine
  modified_base 6: mod_base = OTHER; note = 2'-O-methyladenosine
  modified_base 7: mod_base = OTHER; note = 2'-O-methyluridine
  modified_base 8: mod_base = OTHER; note = 2'-O-methyladenosine
  modified_base 9: mod_base = OTHER; note = 2'-O-methylguanosine
  modified_base 10: mod_base = OTHER; note = 2'-O-methyluridine
  modified_base 11: mod_base = OTHER; note = 2'-O-methyladenosine
  modified_base 12: mod_base = OTHER; note = 2'-O-methyluridine
  modified_base 13: mod_base = OTHER; note = 2'-O-methyladenosine
  modified_base 14: mod_base = OTHER; note = 2'-O-methyladenosine
  modified_base 15: mod_base = OTHER; note = 2'-O-methylcytidine
  modified_base 16: mod_base = OTHER; note = 2'-O-methyladenosine
  modified_base 17: mod_base = OTHER; note = 2'-O-methyladenosine
  modified_base 18: mod_base = OTHER; note = 2'-O-methyluridine
  modified_base 19: mod_base = OTHER; note = 2'-O-methyladenosine
  modified_base 20: mod_base = OTHER; note = 2'-O-methyluridine
  modified_base 21: mod_base = OTHER; note = 2'-O-methylguanosine
  modified_base 22: mod_base = OTHER; note = 2'-O-methylcytidine
  modified_base 23: mod_base = OTHER; note = 2'-O-methyluridine
  modified_base 24: mod_base = OTHER; note = 2'-O-methyladenosine
  modified_base 25: mod_base = OTHER; note = 2'-O-methyladenosine
  modified_base 26: mod_base = OTHER; note = 2'-O-methyladenosine
  modified_base 27: mod_base = OTHER; note = 2'-O-methyluridine
  modified_base 28: mod_base = OTHER; note = 2'-O-methylguanosine
  modified_base 29: mod_base = OTHER; note = 2'-O-methyluridine
  modified_base 30: mod_base = OTHER; note = 2'-O-methyluridine
  modified_base 31: mod_base = OTHER; note = 2'-O-methylguanosine
  modified_base 32: mod_base = OTHER; note = 2'-O-methyluridine
  modified_base 33: mod_base = OTHER; note = 2'-O-methyluridine
  modified_base 34: mod_base = OTHER; note = 2'-O-methyladenosine
  modified_base 35: mod_base = OTHER; note = 2'-O-methyluridine
  modified_base 36: mod_base = OTHER; note = 2'-O-methyladenosine
  modified_base 37: mod_base = OTHER; note = 2'-O-methylguanosine
  modified_base 38: mod_base = OTHER; note = 2'-O-methyluridine
  modified_base 39: mod_base = OTHER; note = 2'-O-methyladenosine
  modified_base 40: mod_base = OTHER; note = 2'-O-methyluridine
  modified_base 41: mod_base = OTHER; note = 2'-O-methylcytidine
  modified_base 42: mod_base = OTHER; note = 2'-O-methylcytidine
  modified_base 43: mod_base = OTHER; note = 2'-O-methylcytidine
  modified_base 44: mod_base = OTHER; note = 2'-O-methyladenosine
  modified_base 45: mod_base = OTHER; note = 2'-O-methylcytidine
  modified_base 46: mod_base = OTHER; note = 2'-O-methylguanosine
  modified_base 47: mod_base = OTHER; note = 2'-O-methylcytidine
  modified_base 48: mod_base = OTHER; note = 2'-O-methyladenosine
  modified_base 49: mod_base = OTHER; note = 2'-O-methylcytidine
  modified_base 50: mod_base = OTHER; note = 2'-O-methyladenosine
  modified_base 51: mod_base = OTHER; note = 2'-O-methylguanosine
  modified_base 53: mod_base = OTHER; note = Inosine
  modified_base 54: mod_base = OTHER; note = Inosine
  modified_base 55: mod_base = OTHER; note = 2'-O-methyladenosine
  modified_base 56: mod_base = OTHER; note = 2'-O-methylguanosine
  modified_base 57: mod_base = OTHER; note = 2'-O-methyladenosine
  modified_base 58: mod_base = OTHER; note = 2'-O-methyluridine
  modified_base 59: mod_base = OTHER; note = 2'-O-methyladenosine phosphorothioate
  modified_base 60: mod_base = OTHER; note = 2'-O-methylguanosine phosphorothioate
  modified_base 61: mod_base = OTHER; note = 2'-O-methyladenosine phosphorothioate
  modified_base 62: mod_base = OTHER; note = 2'-O-methyladenosine phosphorothioate
  modified_base 63: mod_base = OTHER; note = 2'-O-methylguanosine
  misc_feature 1..51: note = RNA
  misc_feature 52..54: note = DNA
  misc_feature 55..63: note = RNA
gtggaatagtataacaatatgctaaatgttgttatagtatcccacgcacagannagatagaag

SEQ ID NO: 177 - DNA, 63 bp, synthetic construct
  source 1..63: mol_type = other DNA; note = Description of Artificial Sequence: Synthetic oligonucleotide; note = Description of Combined DNA/RNA Molecule: Synthetic oligonucleotide
  modified_base 1: mod_base = OTHER; note = 2'-O-methylguanosine phosphorothioate
  modified_base 2: mod_base = OTHER; note = 2'-O-methyluridine phosphorothioate
  modified_base 3: mod_base = OTHER; note = 2'-O-methylguanosine phosphorothioate
  modified_base 4: mod_base = OTHER; note = 2'-O-methylguanosine phosphorothioate
  modified_base 5: mod_base = OTHER; note = 2'-O-methyladenosine
  modified_base 6: mod_base = OTHER; note = 2'-O-methyladenosine
  modified_base 7: mod_base = OTHER; note = 2'-O-methyluridine
  modified_base 8: mod_base = OTHER; note = 2'-O-methyladenosine
  modified_base 9: mod_base = OTHER; note = 2'-O-methylguanosine
  modified_base 10: mod_base = OTHER; note = 2'-O-methyluridine
  modified_base 11: mod_base = OTHER; note = 2'-O-methyladenosine
  modified_base 12: mod_base = OTHER; note = 2'-O-methyluridine
  modified_base 13: mod_base = OTHER; note = 2'-O-methyladenosine
  modified_base 14: mod_base = OTHER; note = 2'-O-methyladenosine
  modified_base 15: mod_base = OTHER; note = 2'-O-methylcytidine
  modified_base 16: mod_base = OTHER; note = 2'-O-methyladenosine
  modified_base 17: mod_base = OTHER; note = 2'-O-methyladenosine
  modified_base 18: mod_base = OTHER; note = 2'-O-methyluridine
  modified_base 19: mod_base = OTHER; note = 2'-O-methyladenosine
  modified_base 20: mod_base = OTHER; note = 2'-O-methyluridine
  modified_base 21: mod_base = OTHER; note = 2'-O-methylguanosine
  modified_base 22: mod_base = OTHER; note = 2'-O-methylcytidine
  modified_base 23: mod_base = OTHER; note = 2'-O-methyluridine
  modified_base 24: mod_base = OTHER; note = 2'-O-methyladenosine
  modified_base 25: mod_base = OTHER; note = 2'-O-methyladenosine
  modified_base 26: mod_base = OTHER; note = 2'-O-methyladenosine
  modified_base 27: mod_base = OTHER; note = 2'-O-methyluridine
  modified_base 28: mod_base = OTHER; note = 2'-O-methylguanosine
  modified_base 29: mod_base = OTHER; note = 2'-O-methyluridine
  modified_base 30: mod_base = OTHER; note = 2'-O-methyluridine
  modified_base 31: mod_base = OTHER; note = 2'-O-methylguanosine
  modified_base 32: mod_base = OTHER; note = 2'-O-methyluridine
  modified_base 33: mod_base = OTHER; note = 2'-O-methyluridine
  modified_base 34: mod_base = OTHER; note = 2'-O-methyladenosine
  modified_base 35: mod_base = OTHER; note = 2'-O-methyluridine
  modified_base 36: mod_base = OTHER; note = 2'-O-methyladenosine
  modified_base 37: mod_base = OTHER; note = 2'-O-methylguanosine
  modified_base 38: mod_base = OTHER; note = 2'-O-methyluridine
  modified_base 39: mod_base = OTHER; note = 2'-O-methyladenosine
  modified_base 40: mod_base = OTHER; note = 2'-O-methyluridine
  modified_base 41: mod_base = OTHER; note = 2'-O-methylcytidine
  modified_base 42: mod_base = OTHER; note = 2'-O-methylcytidine
  modified_base 43: mod_base = OTHER; note = 2'-O-methylcytidine
  modified_base 44: mod_base = OTHER; note = 2'-O-methyladenosine
  modified_base 45: mod_base = OTHER; note = 2'-O-methylcytidine
  modified_base 46: mod_base = OTHER; note = 2'-O-methylguanosine
  modified_base 47: mod_base = OTHER; note = 2'-O-methylcytidine
  modified_base 48: mod_base = OTHER; note = 2'-O-methyladenosine
  modified_base 49: mod_base = OTHER; note = 2'-O-methylcytidine
  modified_base 50: mod_base = OTHER; note = 2'-O-methyladenosine
  modified_base 51: mod_base = OTHER; note = 2'-O-methylguanosine
  modified_base 52: mod_base = OTHER; note = Inosine
  modified_base 54: mod_base = OTHER; note = Inosine
  modified_base 55: mod_base = OTHER; note = 2'-O-methyladenosine
  modified_base 56: mod_base = OTHER; note = 2'-O-methylguanosine
  modified_base 57: mod_base = OTHER; note = 2'-O-methyladenosine
  modified_base 58: mod_base = OTHER; note = 2'-O-methyluridine
  modified_base 59: mod_base = OTHER; note = 2'-O-methyladenosine phosphorothioate
  modified_base 60: mod_base = OTHER; note = 2'-O-methylguanosine phosphorothioate
  modified_base 61: mod_base = OTHER; note = 2'-O-methyladenosine phosphorothioate
  modified_base 62: mod_base = OTHER; note = 2'-O-methyladenosine phosphorothioate
  modified_base 63: mod_base = OTHER; note = 2'-O-methylguanosine
  misc_feature 1..51: note = RNA
  misc_feature 52..54: note = DNA
  misc_feature 55..63: note = RNA
gtggaatagtataacaatatgctaaatgttgttatagtatcccacgcacagncnagatagaag

SEQ ID NO: 178 - DNA, 63 bp, synthetic construct
  source 1..63: mol_type = other DNA; note = Description of Artificial Sequence: Synthetic oligonucleotide; note = Description of Combined DNA/RNA Molecule: Synthetic oligonucleotide
  modified_base 1: mod_base = OTHER; note = 2'-O-methylguanosine phosphorothioate
  modified_base 2: mod_base = OTHER; note = 2'-O-methyluridine phosphorothioate
  modified_base 3: mod_base = OTHER; note = 2'-O-methylguanosine phosphorothioate
  modified_base 4: mod_base = OTHER; note = 2'-O-methylguanosine phosphorothioate
  modified_base 5: mod_base = OTHER; note = 2'-O-methyladenosine
  modified_base 6: mod_base = OTHER; note = 2'-O-methyladenosine
  modified_base 7: mod_base = OTHER; note = 2'-O-methyluridine
  modified_base 8: mod_base = OTHER; note = 2'-O-methyladenosine
  modified_base 9: mod_base = OTHER; note = 2'-O-methylguanosine
  modified_base 10: mod_base = OTHER; note = 2'-O-methyluridine
  modified_base 11: mod_base = OTHER; note = 2'-O-methyladenosine
  modified_base 12: mod_base = OTHER; note = 2'-O-methyluridine
  modified_base 13: mod_base = OTHER; note = 2'-O-methyladenosine
  modified_base 14: mod_base = OTHER; note = 2'-O-methyladenosine
  modified_base 15: mod_base = OTHER; note = 2'-O-methylcytidine
  modified_base 16: mod_base = OTHER; note = 2'-O-methyladenosine
  modified_base 17: mod_base = OTHER; note = 2'-O-methyladenosine
  modified_base 18: mod_base = OTHER; note = 2'-O-methyluridine
  modified_base 19: mod_base = OTHER; note = 2'-O-methyladenosine
  modified_base 20: mod_base = OTHER; note = 2'-O-methyluridine
  modified_base 21: mod_base = OTHER; note = 2'-O-methylguanosine
  modified_base 22: mod_base = OTHER; note = 2'-O-methylcytidine
  modified_base 23: mod_base = OTHER; note = 2'-O-methyluridine
  modified_base 24: mod_base = OTHER; note = 2'-O-methyladenosine
  modified_base 25: mod_base = OTHER; note = 2'-O-methyladenosine
  modified_base 26: mod_base = OTHER; note = 2'-O-methyladenosine
  modified_base 27: mod_base = OTHER; note = 2'-O-methyluridine
  modified_base 28: mod_base = OTHER; note = 2'-O-methylguanosine
  modified_base 29: mod_base = OTHER; note = 2'-O-methyluridine
  modified_base 30: mod_base = OTHER; note = 2'-O-methyluridine
  modified_base 31: mod_base = OTHER; note = 2'-O-methylguanosine
  modified_base 32: mod_base = OTHER; note = 2'-O-methyluridine
  modified_base 33: mod_base = OTHER; note = 2'-O-methyluridine
  modified_base 34: mod_base = OTHER; note = 2'-O-methyladenosine
  modified_base 35: mod_base = OTHER; note = 2'-O-methyluridine
  modified_base 36: mod_base = OTHER; note = 2'-O-methyladenosine
  modified_base 37: mod_base = OTHER; note = 2'-O-methylguanosine
  modified_base 38: mod_base = OTHER; note = 2'-O-methyluridine
  modified_base 39: mod_base = OTHER; note = 2'-O-methyladenosine
  modified_base 40: mod_base = OTHER; note = 2'-O-methyluridine
  modified_base 41: mod_base = OTHER; note = 2'-O-methylcytidine
  modified_base 42: mod_base = OTHER; note = 2'-O-methylcytidine
  modified_base 43: mod_base = OTHER; note = 2'-O-methylcytidine
  modified_base 44: mod_base = OTHER; note = 2'-O-methyladenosine
  modified_base 45: mod_base = OTHER; note = 2'-O-methylcytidine
  modified_base 46: mod_base = OTHER; note = 2'-O-methylguanosine
  modified_base 47: mod_base = OTHER; note = 2'-O-methylcytidine
  modified_base 48: mod_base = OTHER; note = 2'-O-methyladenosine
  modified_base 49: mod_base = OTHER; note = 2'-O-methylcytidine
  modified_base 50: mod_base = OTHER; note = 2'-O-methyladenosine
  modified_base 51: mod_base = OTHER; note = 2'-O-methylguanosine
  modified_base 52: mod_base = OTHER; note = Inosine
  modified_base 53: mod_base = OTHER; note = Inosine
  modified_base 54: mod_base = OTHER; note = Inosine
  modified_base 55: mod_base = OTHER; note = 2'-O-methyladenosine
  modified_base 56: mod_base = OTHER; note = 2'-O-methylguanosine
  modified_base 57: mod_base = OTHER; note = 2'-O-methyladenosine
  modified_base 58: mod_base = OTHER; note = 2'-O-methyluridine
  modified_base 59: mod_base = OTHER; note = 2'-O-methyladenosine phosphorothioate
  modified_base 60: mod_base = OTHER; note = 2'-O-methylguanosine phosphorothioate
  modified_base 61: mod_base = OTHER; note = 2'-O-methyladenosine phosphorothioate
  modified_base 62: mod_base = OTHER; note = 2'-O-methyladenosine phosphorothioate
  modified_base 63: mod_base = OTHER; note = 2'-O-methylguanosine
  misc_feature 1..51: note = RNA
  misc_feature 52..54: note = DNA
  misc_feature 55..63: note = RNA
gtggaatagtataacaatatgctaaatgttgttatagtatcccacgcacagnnnagatagaag

SEQ ID NO: 179 - DNA, 50 bp, synthetic construct; identical to SEQ ID NO: 66
  source 1..50: mol_type = other DNA; note = Description of Artificial Sequence: Synthetic oligonucleotide; note = Description of Combined DNA/RNA Molecule: Synthetic oligonucleotide
  modified_base 1: mod_base = OTHER; note = 2'-O-methyluridine phosphorothioate
  modified_base 2: mod_base = OTHER; note = 2'-O-methyluridine phosphorothioate
  modified_base 3: mod_base = OTHER; note = 2'-O-methyluridine phosphorothioate
  modified_base 4: mod_base = OTHER; note = 2'-O-methylcytidine phosphorothioate
  modified_base 5: mod_base = OTHER; note = 2'-O-methyluridine
  modified_base 6: mod_base = OTHER; note = 2'-O-methyluridine
  modified_base 7: mod_base = OTHER; note = 2'-O-methylguanosine
  modified_base 8: mod_base = OTHER; note = 2'-O-methylguanosine
  modified_base 9: mod_base = OTHER; note = 2'-O-methylguanosine
  modified_base 10: mod_base = OTHER; note = 2'-O-methyladenosine
  modified_base 11: mod_base = OTHER; note = 2'-O-methyladenosine
  modified_base 12: mod_base = OTHER; note = 2'-O-methyluridine
  modified_base 13: mod_base = OTHER; note = 2'-O-methylguanosine
  modified_base 14: mod_base = OTHER; note = 2'-O-methylguanosine
  modified_base 15: mod_base = OTHER; note = 2'-O-methylcytidine
  modified_base 16: mod_base = OTHER; note = 2'-O-methylcytidine
  modified_base 17: mod_base = OTHER; note = 2'-O-methyluridine
  modified_base 18: mod_base = OTHER; note = 2'-O-methylguanosine
  modified_base 19: mod_base = OTHER; note = 2'-O-methyladenosine
  modified_base 20: mod_base = OTHER; note = 2'-O-methylguanosine
  modified_base 21: mod_base = OTHER; note = 2'-O-methylguanosine
  modified_base 22: mod_base = OTHER; note = 2'-O-methylguanosine
  modified_base 23: mod_base = OTHER; note = 2'-O-methyluridine
  modified_base 24: mod_base = OTHER; note = 2'-O-methylcytidine
  modified_base 25: mod_base = OTHER; note = 2'-O-methylguanosine
  modified_base 26: mod_base = OTHER; note = 2'-O-methylguanosine
  modified_base 27: mod_base = OTHER; note = 2'-O-methylcytidine
  modified_base 28: mod_base = OTHER; note = 2'-O-methylcytidine
  modified_base 29: mod_base = OTHER; note = 2'-O-methyluridine
  modified_base 30: mod_base = OTHER; note = 2'-O-methylcytidine
  modified_base 31: mod_base = OTHER; note = 2'-O-methyladenosine
  modified_base 32: mod_base = OTHER; note = 2'-O-methylguanosine
  modified_base 33: mod_base = OTHER; note = 2'-O-methylcytidine
  modified_base 34: mod_base = OTHER; note = 2'-O-methyluridine
  modified_base 35: mod_base = OTHER; note = 2'-O-methyluridine
  modified_base 36: mod_base = OTHER; note = Arabinouridine
  modified_base 39: mod_base = OTHER; note = 2'-O-methyladenosine
  modified_base 40: mod_base = OTHER; note = 2'-O-methylcytidine
  modified_base 41: mod_base = OTHER; note = 2'-O-methyluridine
  modified_base 42: mod_base = OTHER; note = 2'-O-methyluridine
  modified_base 43: mod_base = OTHER; note = 2'-O-methylcytidine
  modified_base 44: mod_base = OTHER; note = 2'-O-methylcytidine
  modified_base 45: mod_base = OTHER; note = 2'-O-methyluridine
  modified_base 46: mod_base = OTHER; note = 2'-O-methylguanosine phosphorothioate
  modified_base 47: mod_base = OTHER; note = 2'-O-methylcytidine phosphorothioate
  modified_base 48: mod_base = OTHER; note = 2'-O-methylcytidine phosphorothioate
  modified_base 49: mod_base = OTHER; note = 2'-O-methylguanosine phosphorothioate
  modified_base 50: mod_base = OTHER; note = 2'-O-methylguanosine
  misc_feature 1..36: note = RNA
  misc_feature 37..38: note = DNA
  misc_feature 39..50: note = RNA

SEQ ID NO: 180 - DNA, 50 bp, synthetic construct; identical to SEQ ID NO: 66
  source 1..50: mol_type = other DNA; note = Description of Artificial Sequence: Synthetic oligonucleotide; note = Description of Combined DNA/RNA Molecule: Synthetic oligonucleotide
  modified_base 1: mod_base = OTHER; note = 2'-O-methyluridine phosphorothioate
  modified_base 2: mod_base = OTHER; note = 2'-O-methyluridine phosphorothioate
  modified_base 3: mod_base = OTHER; note = 2'-O-methyluridine phosphorothioate
  modified_base 4: mod_base = OTHER; note = 2'-O-methylcytidine phosphorothioate
  modified_base 5: mod_base = OTHER; note = 2'-O-methyluridine
  modified_base 6: mod_base = OTHER; note = 2'-O-methyluridine
  modified_base 7: mod_base = OTHER; note = 2'-O-methylguanosine
  modified_base 8: mod_base = OTHER; note = 2'-O-methylguanosine
  modified_base 9: mod_base = OTHER; note = 2'-O-methylguanosine
  modified_base 10: mod_base = OTHER; note = 2'-O-methyladenosine
  modified_base 11: mod_base = OTHER; note = 2'-O-methyladenosine
  modified_base 12: mod_base = OTHER; note = 2'-O-methyluridine
  modified_base 13: mod_base = OTHER; note = 2'-O-methylguanosine
  modified_base 14: mod_base = OTHER; note = 2'-O-methylguanosine
  modified_base 15: mod_base = OTHER; note = 2'-O-methylcytidine
  modified_base 16: mod_base = OTHER; note = 2'-O-methylcytidine
  modified_base 17: mod_base = OTHER; note = 2'-O-methyluridine
  modified_base 18: mod_base = OTHER; note = 2'-O-methylguanosine
  modified_base 19: mod_base = OTHER; note = 2'-O-methyladenosine
  modified_base 20: mod_base = OTHER; note = 2'-O-methylguanosine
  modified_base 21: mod_base = OTHER; note = 2'-O-methylguanosine
  modified_base 22: mod_base = OTHER; note = 2'-O-methylguanosine
  modified_base 23: mod_base = OTHER; note = 2'-O-methyluridine
  modified_base 24: mod_base = OTHER; note = 2'-O-methylcytidine
  modified_base 25: mod_base = OTHER; note = 2'-O-methylguanosine
  modified_base 26: mod_base = OTHER; note = 2'-O-methylguanosine
  modified_base 27: mod_base = OTHER; note = 2'-O-methylcytidine
  modified_base 28: mod_base = OTHER; note = 2'-O-methylcytidine
  modified_base 29: mod_base = OTHER; note = 2'-O-methyluridine
  modified_base 30: mod_base = OTHER; note = 2'-O-methylcytidine
  modified_base 31: mod_base = OTHER; note = 2'-O-methyladenosine
  modified_base 32: mod_base = OTHER; note = 2'-O-methylguanosine
  modified_base 33: mod_base = OTHER; note = 2'-O-methylcytidine
  modified_base 34: mod_base = OTHER; note = 2'-O-methyluridine
  modified_base 35: mod_base = OTHER; note = 2'-O-methyluridine
  modified_base 37: mod_base = OTHER; note = Arabinocytidine
  modified_base 39: mod_base = OTHER; note = 2'-O-methyladenosine
  modified_base 40: mod_base = OTHER; note = 2'-O-methylcytidine
  modified_base 41: mod_base = OTHER; note = 2'-O-methyluridine
  modified_base 42: mod_base = OTHER; note = 2'-O-methyluridine
  modified_base 43: mod_base = OTHER; note = 2'-O-methylcytidine
  modified_base 44: mod_base = OTHER; note = 2'-O-methylcytidine
  modified_base 45: mod_base = OTHER; note = 2'-O-methyluridine
  modified_base 46: mod_base = OTHER; note = 2'-O-methylguanosine phosphorothioate
  modified_base 47: mod_base = OTHER; note = 2'-O-methylcytidine phosphorothioate
  modified_base 48: mod_base = OTHER; note = 2'-O-methylcytidine phosphorothioate
  modified_base 49: mod_base = OTHER; note = 2'-O-methylguanosine phosphorothioate
  modified_base 50: mod_base = OTHER; note = 2'-O-methylguanosine
  misc_feature 1..35: note = RNA
  misc_feature 36: note = DNA
  misc_feature 37: note = RNA
  misc_feature 38: note = DNA
  misc_feature 39..50: note = RNA

SEQ ID NO: 181 - DNA, 50 bp, synthetic construct; identical to SEQ ID NO: 66
  source 1..50: mol_type = other DNA; note = Description of Artificial Sequence: Synthetic oligonucleotide; note = Description of Combined DNA/RNA Molecule: Synthetic oligonucleotide
  modified_base 1: mod_base = OTHER; note = 2'-O-methyluridine phosphorothioate
  modified_base 2: mod_base = OTHER; note = 2'-O-methyluridine phosphorothioate
  modified_base 3: mod_base = OTHER; note = 2'-O-methyluridine phosphorothioate
  modified_base 4: mod_base = OTHER; note = 2'-O-methylcytidine phosphorothioate
  modified_base 5: mod_base = OTHER; note = 2'-O-methyluridine
  modified_base 6: mod_base = OTHER; note = 2'-O-methyluridine
  modified_base 7: mod_base = OTHER; note = 2'-O-methylguanosine
  modified_base 8: mod_base = OTHER; note = 2'-O-methylguanosine
  modified_base 9: mod_base = OTHER; note = 2'-O-methylguanosine
  modified_base 10: mod_base = OTHER; note = 2'-O-methyladenosine
  modified_base 11: mod_base = OTHER; note = 2'-O-methyladenosine
  modified_base 12: mod_base = OTHER; note = 2'-O-methyluridine
  modified_base 13: mod_base = OTHER; note = 2'-O-methylguanosine
  modified_base 14: mod_base = OTHER; note = 2'-O-methylguanosine
  modified_base 15: mod_base = OTHER; note = 2'-O-methylcytidine
  modified_base 16: mod_base = OTHER; note = 2'-O-methylcytidine
  modified_base 17: mod_base = OTHER; note = 2'-O-methyluridine
  modified_base 18: mod_base = OTHER; note = 2'-O-methylguanosine
  modified_base 19: mod_base = OTHER; note = 2'-O-methyladenosine
  modified_base 20: mod_base = OTHER; note = 2'-O-methylguanosine
  modified_base 21: mod_base = OTHER; note = 2'-O-methylguanosine
  modified_base 22: mod_base = OTHER; note = 2'-O-methylguanosine
  modified_base 23: mod_base = OTHER; note = 2'-O-methyluridine
  modified_base 24: mod_base = OTHER; note = 2'-O-methylcytidine
  modified_base 25: mod_base = OTHER; note = 2'-O-methylguanosine
  modified_base 26: mod_base = OTHER; note = 2'-O-methylguanosine
  modified_base 27: mod_base = OTHER; note = 2'-O-methylcytidine
  modified_base 28: mod_base = OTHER; note = 2'-O-methylcytidine
  modified_base 29: mod_base = OTHER; note = 2'-O-methyluridine
  modified_base 30: mod_base = OTHER; note = 2'-O-methylcytidine
  modified_base 31: mod_base = OTHER; note = 2'-O-methyladenosine
  modified_base 32: mod_base = OTHER; note = 2'-O-methylguanosine
  modified_base 33: mod_base = OTHER; note = 2'-O-methylcytidine
  modified_base 34: mod_base = OTHER; note = 2'-O-methyluridine
  modified_base 35: mod_base = OTHER; note = 2'-O-methyluridine
  modified_base 38: mod_base = OTHER; note = Arabinocytidine
  modified_base 39: mod_base = OTHER; note = 2'-O-methyladenosine
  modified_base 40: mod_base = OTHER; note = 2'-O-methylcytidine
  modified_base 41: mod_base = OTHER; note = 2'-O-methyluridine
  modified_base 42: mod_base = OTHER; note = 2'-O-methyluridine
  modified_base 43: mod_base = OTHER; note = 2'-O-methylcytidine
  modified_base 44: mod_base = OTHER; note = 2'-O-methylcytidine
  modified_base 45: mod_base = OTHER; note = 2'-O-methyluridine
  modified_base 46: mod_base = OTHER; note = 2'-O-methylguanosine phosphorothioate
  modified_base 47: mod_base = OTHER; note = 2'-O-methylcytidine phosphorothioate
  modified_base 48: mod_base = OTHER; note = 2'-O-methylcytidine phosphorothioate
  modified_base 49: mod_base = OTHER; note = 2'-O-methylguanosine phosphorothioate
  modified_base 50: mod_base = OTHER; note = 2'-O-methylguanosine
  misc_feature 1..35: note = RNA
  misc_feature 36..37: note = DNA
  misc_feature 38..50: note = RNA

SEQ ID NO: 182 - RNA, 50 nt, synthetic construct; identical to SEQ ID NO: 79
  source 1..50: mol_type = other RNA; note = Description of Artificial Sequence: Synthetic oligonucleotide
  modified_base 1: mod_base = OTHER; note = 2'-O-methyluridine phosphorothioate
  modified_base 2: mod_base = OTHER; note = 2'-O-methyluridine phosphorothioate
  modified_base 3: mod_base = OTHER; note = 2'-O-methyluridine phosphorothioate
  modified_base 4: mod_base = OTHER; note = 2'-O-methylcytidine phosphorothioate
  modified_base 5: mod_base = OTHER; note = 2'-O-methyluridine
  modified_base 6: mod_base = OTHER; note = 2'-O-methyluridine
  modified_base 7: mod_base = OTHER; note = 2'-O-methylguanosine
  modified_base 8: mod_base = OTHER; note = 2'-O-methylguanosine
  modified_base 9: mod_base = OTHER; note = 2'-O-methylguanosine
  modified_base 10: mod_base = OTHER; note = 2'-O-methyladenosine
  modified_base 11: mod_base = OTHER; note = 2'-O-methyladenosine
  modified_base 12: mod_base = OTHER; note = 2'-O-methyluridine
  modified_base 13: mod_base = OTHER; note = 2'-O-methylguanosine
  modified_base 14: mod_base = OTHER; note = 2'-O-methylguanosine
  modified_base 15: mod_base = OTHER; note = 2'-O-methylcytidine
  modified_base 16: mod_base = OTHER; note = 2'-O-methylcytidine
  modified_base 17: mod_base = OTHER; note = 2'-O-methyluridine
  modified_base 18: mod_base = OTHER; note = 2'-O-methylguanosine
  modified_base 19: mod_base = OTHER; note = 2'-O-methyladenosine
  modified_base 20: mod_base = OTHER; note = 2'-O-methylguanosine
  modified_base 21: mod_base = OTHER; note = 2'-O-methylguanosine
  modified_base 22: mod_base = OTHER; note = 2'-O-methylguanosine
  modified_base 23: mod_base = OTHER; note = 2'-O-methyluridine
  modified_base 24: mod_base = OTHER; note = 2'-O-methylcytidine
  modified_base 25: mod_base = OTHER; note = 2'-O-methylguanosine
  modified_base 26: mod_base = OTHER; note = 2'-O-methylguanosine
  modified_base 27: mod_base = OTHER; note = 2'-O-methylcytidine
  modified_base 28: mod_base = OTHER; note = 2'-O-methylcytidine
  modified_base 29: mod_base = OTHER; note = 2'-O-methyluridine
  modified_base 30: mod_base = OTHER; note = 2'-O-methylcytidine
  modified_base 31: mod_base = OTHER; note = 2'-O-methyladenosine
  modified_base 32: mod_base = OTHER; note = 2'-O-methylguanosine
  modified_base 33: mod_base = OTHER; note = 2'-O-methylcytidine
  modified_base 34: mod_base = OTHER; note = 2'-O-methyluridine
  modified_base 35: mod_base = OTHER; note = 2'-O-methyluridine
  modified_base 36: mod_base = OTHER; note = Arabinouridine
  modified_base 37: mod_base = OTHER; note = Arabinocytidine
  modified_base 38: mod_base = OTHER; note = Arabinocytidine
  modified_base 39: mod_base = OTHER; note = 2'-O-methyladenosine
  modified_base 40: mod_base = OTHER; note = 2'-O-methylcytidine
  modified_base 41: mod_base = OTHER; note = 2'-O-methyluridine
  modified_base 42: mod_base = OTHER; note = 2'-O-methyluridine
  modified_base 43: mod_base = OTHER; note = 2'-O-methylcytidine
  modified_base 44: mod_base = OTHER; note = 2'-O-methylcytidine
  modified_base 45: mod_base = OTHER; note = 2'-O-methyluridine
  modified_base 46: mod_base = OTHER; note = 2'-O-methylguanosine phosphorothioate
  modified_base 47: mod_base = OTHER; note = 2'-O-methylcytidine phosphorothioate
  modified_base 48: mod_base = OTHER; note = 2'-O-methylcytidine phosphorothioate
  modified_base 49: mod_base = OTHER; note = 2'-O-methylguanosine phosphorothioate
  modified_base 50: mod_base = OTHER; note = 2'-O-methylguanosine

SEQ ID NO: 183 - DNA, 50 bp, synthetic construct; identical to SEQ ID NO: 66
  source 1..50: mol_type = other DNA; note = Description of Artificial Sequence: Synthetic oligonucleotide; note = Description of Combined DNA/RNA Molecule: Synthetic oligonucleotide
  modified_base 1: mod_base = OTHER; note = 2'-O-methyluridine phosphorothioate
  modified_base 2: mod_base = OTHER; note = 2'-O-methyluridine phosphorothioate
  modified_base 3: mod_base = OTHER; note = 2'-O-methyluridine phosphorothioate
  modified_base 4: mod_base = OTHER; note = 2'-O-methylcytidine phosphorothioate
  modified_base 5: mod_base = OTHER; note = 2'-O-methyluridine
  modified_base 6: mod_base = OTHER; note = 2'-O-methyluridine
  modified_base 7: mod_base = OTHER; note = 2'-O-methylguanosine
  modified_base 8: mod_base = OTHER; note = 2'-O-methylguanosine
  modified_base 9: mod_base = OTHER; note = 2'-O-methylguanosine
  modified_base 10: mod_base = OTHER; note = 2'-O-methyladenosine
  modified_base 11: mod_base = OTHER; note = 2'-O-methyladenosine
  modified_base 12: mod_base = OTHER; note = 2'-O-methyluridine
  modified_base 13: mod_base = OTHER; note = 2'-O-methylguanosine
  modified_base 14: mod_base = OTHER; note = 2'-O-methylguanosine
  modified_base 15: mod_base = OTHER; note = 2'-O-methylcytidine
  modified_base 16: mod_base = OTHER; note = 2'-O-methylcytidine
  modified_base 17: mod_base = OTHER; note = 2'-O-methyluridine
  modified_base 18: mod_base = OTHER; note = 2'-O-methylguanosine
  modified_base 19: mod_base = OTHER; note = 2'-O-methyladenosine
  modified_base 20: mod_base = OTHER; note = 2'-O-methylguanosine
  modified_base 21: mod_base = OTHER; note = 2'-O-methylguanosine
  modified_base 22: mod_base = OTHER; note = 2'-O-methylguanosine
  modified_base 23: mod_base = OTHER; note = 2'-O-methyluridine
  modified_base 24: mod_base = OTHER; note = 2'-O-methylcytidine
  modified_base 25: mod_base = OTHER; note = 2'-O-methylguanosine
  modified_base 26: mod_base = OTHER; note = 2'-O-methylguanosine
  modified_base 27: mod_base = OTHER; note = 2'-O-methylcytidine
  modified_base 28: mod_base = OTHER; note = 2'-O-methylcytidine
  modified_base 29: mod_base = OTHER; note = 2'-O-methyluridine
  modified_base 30: mod_base = OTHER; note = 2'-O-methylcytidine
  modified_base 31: mod_base = OTHER; note = 2'-O-methyladenosine
  modified_base 32: mod_base = OTHER; note = 2'-O-methylguanosine
  modified_base 33: mod_base = OTHER; note = 2'-O-methylcytidine
  modified_base 34: mod_base = OTHER; note = 2'-O-methyluridine
  modified_base 35: mod_base = OTHER; note = 2'-O-methyluridine
  modified_base 36: mod_base = OTHER; note = 2'-OMe-arabinouridine
  modified_base 39: mod_base = OTHER; note = 2'-O-methyladenosine
  modified_base 40: mod_base = OTHER; note = 2'-O-methylcytidine
  modified_base 41: mod_base = OTHER; note = 2'-O-methyluridine
  modified_base 42: mod_base = OTHER; note = 2'-O-methyluridine
  modified_base 43: mod_base = OTHER; note = 2'-O-methylcytidine
  modified_base 44: mod_base = OTHER; note = 2'-O-methylcytidine
  modified_base 45: mod_base = OTHER; note = 2'-O-methyluridine
  modified_base 46: mod_base = OTHER; note = 2'-O-methylguanosine phosphorothioate
  modified_base 47: mod_base = OTHER; note = 2'-O-methylcytidine phosphorothioate
  modified_base 48: mod_base = OTHER; note = 2'-O-methylcytidine phosphorothioate
  modified_base 49: mod_base = OTHER; note = 2'-O-methylguanosine phosphorothioate
  modified_base 50: mod_base = OTHER; note = 2'-O-methylguanosine
  misc_feature 1..36: note = RNA
  misc_feature 37..38: note = DNA
  misc_feature 39..50: note = RNA

SEQ ID NO: 184 - DNA, 50 bp, synthetic construct; identical to SEQ ID NO: 66
  source 1..50: mol_type = other DNA; note = Description of Artificial Sequence: Synthetic oligonucleotide; note = Description of Combined DNA/RNA Molecule: Synthetic oligonucleotide
  modified_base 1: mod_base = OTHER; note = 2'-O-methyluridine phosphorothioate
  modified_base 2: mod_base = OTHER; note = 2'-O-methyluridine phosphorothioate
  modified_base 3: mod_base = OTHER; note = 2'-O-methyluridine phosphorothioate
  modified_base 4: mod_base = OTHER; note = 2'-O-methylcytidine phosphorothioate
  modified_base 5: mod_base = OTHER; note = 2'-O-methyluridine
  modified_base 6: mod_base = OTHER; note = 2'-O-methyluridine
  modified_base 7: mod_base = OTHER; note = 2'-O-methylguanosine
  modified_base 8: mod_base = OTHER; note = 2'-O-methylguanosine
  modified_base 9: mod_base = OTHER; note = 2'-O-methylguanosine
  modified_base 10: mod_base = OTHER; note = 2'-O-methyladenosine
  modified_base 11: mod_base = OTHER; note = 2'-O-methyladenosine
  modified_base 12: mod_base = OTHER; note = 2'-O-methyluridine
  modified_base 13: mod_base = OTHER; note = 2'-O-methylguanosine
  modified_base 14: mod_base = OTHER; note = 2'-O-methylguanosine
  modified_base 15: mod_base = OTHER; note = 2'-O-methylcytidine
  modified_base 16: mod_base = OTHER; note = 2'-O-methylcytidine
  modified_base 17: mod_base = OTHER; note = 2'-O-methyluridine
  modified_base 18: mod_base = OTHER; note = 2'-O-methylguanosine
  modified_base 19: mod_base = OTHER; note = 2'-O-methyladenosine
  modified_base 20: mod_base = OTHER; note = 2'-O-methylguanosine
  modified_base 21: mod_base = OTHER; note = 2'-O-methylguanosine
  modified_base 22: mod_base = OTHER; note = 2'-O-methylguanosine
  modified_base 23: mod_base = OTHER; note = 2'-O-methyluridine
  modified_base 24: mod_base = OTHER; note = 2'-O-methylcytidine
  modified_base 25: mod_base = OTHER; note = 2'-O-methylguanosine
  modified_base 26: mod_base = OTHER; note = 2'-O-methylguanosine
  modified_base 27: mod_base = OTHER; note = 2'-O-methylcytidine
  modified_base 28: mod_base = OTHER; note = 2'-O-methylcytidine
  modified_base 29: mod_base = OTHER; note = 2'-O-methyluridine
  modified_base 30: mod_base = OTHER; note = 2'-O-methylcytidine
  modified_base 31: mod_base = OTHER; note = 2'-O-methyladenosine
  modified_base 32: mod_base = OTHER; note = 2'-O-methylguanosine
  modified_base 33: mod_base = OTHER; note = 2'-O-methylcytidine
  modified_base 34: mod_base = OTHER; note = 2'-O-methyluridine
  modified_base 35: mod_base = OTHER; note = 2'-O-methyluridine
  modified_base 37: mod_base = OTHER; note = 2'-OMe-arabinocytidine
  modified_base 39: mod_base = OTHER; note = 2'-O-methyladenosine
  modified_base 40: mod_base = OTHER; note = 2'-O-methylcytidine
  modified_base 41: mod_base = OTHER; note = 2'-O-methyluridine
  modified_base 42: mod_base = OTHER; note = 2'-O-methyluridine
  modified_base 43: mod_base = OTHER; note = 2'-O-methylcytidine
  modified_base 44: mod_base = OTHER; note = 2'-O-methylcytidine
  modified_base 45: mod_base = OTHER; note = 2'-O-methyluridine
  modified_base 46: mod_base = OTHER; note = 2'-O-methylguanosine phosphorothioate
  modified_base 47: mod_base = OTHER; note = 2'-O-methylcytidine phosphorothioate
  modified_base 48: mod_base = OTHER; note = 2'-O-methylcytidine phosphorothioate
  modified_base 49: mod_base = OTHER; note = 2'-O-methylguanosine phosphorothioate
  modified_base 50: mod_base = OTHER; note = 2'-O-methylguanosine
  misc_feature 1..35: note = RNA
  misc_feature 36: note = DNA
  misc_feature 37: note = RNA
  misc_feature 38: note = DNA
  misc_feature 39..50: note = RNA

SEQ ID NO: 185 - DNA, 50 bp, synthetic construct; identical to SEQ ID NO: 66
  source 1..50: mol_type = other DNA; note = Description of Artificial Sequence: Synthetic oligonucleotide; note = Description of Combined DNA/RNA Molecule: Synthetic oligonucleotide
  modified_base 1: mod_base = OTHER; note = 2'-O-methyluridine phosphorothioate
  modified_base 2: mod_base = OTHER; note = 2'-O-methyluridine phosphorothioate
  modified_base 3: mod_base = OTHER; note = 2'-O-methyluridine phosphorothioate
  modified_base 4: mod_base = OTHER; note = 2'-O-methylcytidine phosphorothioate
  modified_base 5: mod_base = OTHER; note = 2'-O-methyluridine
  modified_base 6: mod_base = OTHER; note = 2'-O-methyluridine
  modified_base 7: mod_base = OTHER; note = 2'-O-methylguanosine
  modified_base 8: mod_base = OTHER; note = 2'-O-methylguanosine
  modified_base 9: mod_base = OTHER; note = 2'-O-methylguanosine
  modified_base 10: mod_base = OTHER; note = 2'-O-methyladenosine
  modified_base 11: mod_base = OTHER; note = 2'-O-methyladenosine
  modified_base 12: mod_base = OTHER; note = 2'-O-methyluridine
  modified_base 13: mod_base = OTHER; note = 2'-O-methylguanosine
  modified_base 14: mod_base = OTHER; note = 2'-O-methylguanosine
  modified_base 15: mod_base = OTHER; note = 2'-O-methylcytidine
  modified_base 16: mod_base = OTHER; note = 2'-O-methylcytidine
  modified_base 17: mod_base = OTHER; note = 2'-O-methyluridine
  modified_base 18: mod_base = OTHER; note = 2'-O-methylguanosine
  modified_base 19: mod_base = OTHER; note = 2'-O-methyladenosine
  modified_base 20: mod_base = OTHER; note = 2'-O-methylguanosine
  modified_base 21: mod_base = OTHER; note = 2'-O-methylguanosine
  modified_base 22: mod_base = OTHER; note = 2'-O-methylguanosine
  modified_base 23: mod_base = OTHER; note = 2'-O-methyluridine
  modified_base 24: mod_base = OTHER; note = 2'-O-methylcytidine
  modified_base 25: mod_base = OTHER; note = 2'-O-methylguanosine
  modified_base 26: mod_base = OTHER; note = 2'-O-methylguanosine
  modified_base 27: mod_base = OTHER; note = 2'-O-methylcytidine
  modified_base 28: mod_base = OTHER; note = 2'-O-methylcytidine
  modified_base 29: mod_base = OTHER; note = 2'-O-methyluridine
  modified_base 30: mod_base = OTHER; note = 2'-O-methylcytidine
  modified_base 31: mod_base = OTHER; note = 2'-O-methyladenosine
  modified_base 32: mod_base = OTHER; note = 2'-O-methylguanosine
  modified_base 33: mod_base = OTHER; note = 2'-O-methylcytidine
  modified_base 34: mod_base = OTHER; note = 2'-O-methyluridine
  modified_base 35: mod_base = OTHER; note = 2'-O-methyluridine
  modified_base 38: mod_base = OTHER; note = 2'-OMe-arabinocytidine
  modified_base 39: mod_base = OTHER; note = 2'-O-methyladenosine
  modified_base 40: mod_base = OTHER; note = 2'-O-methylcytidine
  modified_base 41: mod_base = OTHER; note = 2'-O-methyluridine
  modified_base 42: mod_base = OTHER; note = 2'-O-methyluridine
  modified_base 43: mod_base = OTHER; note = 2'-O-methylcytidine
  modified_base 44: mod_base = OTHER; note = 2'-O-methylcytidine
  modified_base 45: mod_base = OTHER; note = 2'-O-methyluridine
  modified_base 46: mod_base = OTHER; note = 2'-O-methylguanosine phosphorothioate
  modified_base 47: mod_base = OTHER; note = 2'-O-methylcytidine phosphorothioate
  modified_base 48: mod_base = OTHER; note = 2'-O-methylcytidine phosphorothioate
  modified_base 49: mod_base = OTHER; note = 2'-O-methylguanosine phosphorothioate
  modified_base 50: mod_base = OTHER; note = 2'-O-methylguanosine
  misc_feature 1..35: note = RNA
  misc_feature 36..37: note = DNA
  misc_feature 38..50: note = RNA

SEQ ID NO: 186 - DNA, 50 bp, synthetic construct; identical to SEQ ID NO: 66
  source 1..50: mol_type = other DNA; note = Description of Artificial Sequence: Synthetic oligonucleotide; note = Description of Combined DNA/RNA Molecule: Synthetic oligonucleotide
  modified_base 1: mod_base = OTHER; note = 2'-O-methyluridine phosphorothioate
  modified_base 2: mod_base = OTHER; note = 2'-O-methyluridine phosphorothioate
  modified_base 3: mod_base = OTHER; note = 2'-O-methyluridine phosphorothioate
  modified_base 4: mod_base = OTHER; note = 2'-O-methylcytidine phosphorothioate
  modified_base 5: mod_base = OTHER; note = 2'-O-methyluridine
  modified_base 6: mod_base = OTHER; note = 2'-O-methyluridine
  modified_base 7: mod_base = OTHER; note = 2'-O-methylguanosine
  modified_base 8: mod_base = OTHER; note = 2'-O-methylguanosine
  modified_base 9: mod_base = OTHER; note = 2'-O-methylguanosine
  modified_base 10: mod_base = OTHER; note = 2'-O-methyladenosine
  modified_base 11: mod_base = OTHER; note = 2'-O-methyladenosine
  modified_base 12: mod_base = OTHER; note = 2'-O-methyluridine
  modified_base 13: mod_base = OTHER; note = 2'-O-methylguanosine
  modified_base 14: mod_base = OTHER; note = 2'-O-methylguanosine
  modified_base 15: mod_base = OTHER; note = 2'-O-methylcytidine
  modified_base 16: mod_base = OTHER; note = 2'-O-methylcytidine
  modified_base 17: mod_base = OTHER; note = 2'-O-methyluridine
  modified_base 18: mod_base = OTHER; note = 2'-O-methylguanosine
  modified_base 19: mod_base = OTHER; note = 2'-O-methyladenosine
  modified_base 20: mod_base = OTHER; note = 2'-O-methylguanosine
  modified_base 21: mod_base = OTHER; note = 2'-O-methylguanosine
  modified_base 22: mod_base = OTHER; note = 2'-O-methylguanosine
  modified_base 23: mod_base = OTHER; note = 2'-O-methyluridine
  modified_base 24: mod_base = OTHER; note = 2'-O-methylcytidine
  modified_base 25: mod_base = OTHER; note = 2'-O-methylguanosine
  modified_base 26: mod_base = OTHER; note = 2'-O-methylguanosine
  modified_base 27: mod_base = OTHER; note = 2'-O-methylcytidine
  modified_base 28: mod_base = OTHER; note = 2'-O-methylcytidine
  modified_base 29: mod_base = OTHER; note = 2'-O-methyluridine
  modified_base 30: mod_base = OTHER; note = 2'-O-methylcytidine
  modified_base 31: mod_base = OTHER; note = 2'-O-methyladenosine
  modified_base 32: mod_base = OTHER; note = 2'-O-methylguanosine
  modified_base 33: mod_base = OTHER; note = 2'-O-methylcytidine
  modified_base 34: mod_base = OTHER; note = 2'-O-methyluridine
  modified_base 35: mod_base = OTHER; note = 2'-O-methyluridine
  modified_base 37: mod_base = OTHER; note = Alpha-anomer cytidine
  modified_base 39: mod_base = OTHER; note = 2'-O-methyladenosine
  modified_base 40: mod_base = OTHER; note = 2'-O-methylcytidine
  modified_base 41: mod_base = OTHER; note = 2'-O-methyluridine
  modified_base 42: mod_base = OTHER; note = 2'-O-methyluridine
  modified_base 43: mod_base = OTHER; note = 2'-O-methylcytidine
  modified_base 44: mod_base = OTHER; note = 2'-O-methylcytidine
  modified_base 45: mod_base = OTHER; note = 2'-O-methyluridine
  modified_base 46: mod_base = OTHER; note = 2'-O-methylguanosine phosphorothioate
  modified_base 47: mod_base = OTHER; note = 2'-O-methylcytidine phosphorothioate
  modified_base 48: mod_base = OTHER; note = 2'-O-methylcytidine phosphorothioate
  modified_base 49: mod_base = OTHER; note = 2'-O-methylguanosine phosphorothioate
  modified_base 50: mod_base = OTHER; note = 2'-O-methylguanosine
  misc_feature 1..35: note = RNA
  misc_feature 36..38: note = DNA
  misc_feature 39..50: note = RNA

SEQ ID NO: 187 - DNA, 50 bp, synthetic construct
  source 1..50: mol_type = other DNA; note = Description of Artificial Sequence: Synthetic oligonucleotide; note = Description of Combined DNA/RNA Molecule: Synthetic oligonucleotide
  modified_base 1: mod_base = OTHER; note = 2'-O-methyluridine phosphorothioate
  modified_base 2: mod_base = OTHER; note = 2'-O-methyluridine phosphorothioate
  modified_base 3: mod_base = OTHER; note = 2'-O-methyluridine phosphorothioate
  modified_base 4: mod_base = OTHER; note = 2'-O-methylcytidine phosphorothioate
  modified_base 5: mod_base = OTHER; note = 2'-O-methyluridine
  modified_base 6: mod_base = OTHER; note = 2'-O-methyluridine
  modified_base 7: mod_base = OTHER; note = 2'-O-methylguanosine
  modified_base 8: mod_base = OTHER; note = 2'-O-methylguanosine
  modified_base 9: mod_base = OTHER; note = 2'-O-methylguanosine
  modified_base 10: mod_base = OTHER; note = 2'-O-methyladenosine
  modified_base 11: mod_base = OTHER; note = 2'-O-methyladenosine
  modified_base 12: mod_base = OTHER; note = 2'-O-methyluridine
  modified_base 13: mod_base = OTHER; note = 2'-O-methylguanosine
  modified_base 14: mod_base = OTHER; note = 2'-O-methylguanosine
  modified_base 15: mod_base = OTHER; note = 2'-O-methylcytidine
  modified_base 16: mod_base = OTHER; note = 2'-O-methylcytidine
  modified_base 17: mod_base = OTHER; note = 2'-O-methyluridine
  modified_base 18: mod_base = OTHER; note = 2'-O-methylguanosine
  modified_base 19: mod_base = OTHER; note = 2'-O-methyladenosine
  modified_base 20: mod_base = OTHER; note = 2'-O-methylguanosine
  modified_base 21: mod_base = OTHER; note = 2'-O-methylguanosine
  modified_base 22: mod_base = OTHER; note = 2'-O-methylguanosine
  modified_base 23: mod_base = OTHER; note = 2'-O-methyluridine
  modified_base 24: mod_base = OTHER; note = 2'-O-methylcytidine
  modified_base 25: mod_base = OTHER; note = 2'-O-methylguanosine
  modified_base 26: mod_base = OTHER; note = 2'-O-methylguanosine
  modified_base 27: mod_base = OTHER; note = 2'-O-methylcytidine
  modified_base 28: mod_base = OTHER; note = 2'-O-methylcytidine
  modified_base 29: mod_base = OTHER; note = 2'-O-methyluridine
  modified_base 30: mod_base = OTHER; note = 2'-O-methylcytidine
  modified_base 31: mod_base = OTHER; note = 2'-O-methyladenosine
  modified_base 32: mod_base = OTHER; note = 2'-O-methylguanosine
  modified_base 33: mod_base = OTHER; note = 2'-O-methylcytidine
  modified_base 34: mod_base = OTHER; note = 2'-O-methyluridine
  modified_base 35: mod_base = OTHER; note = 2'-O-methyluridine
  modified_base 37: mod_base = OTHER; note = Abasic nucleotide
  modified_base 39: mod_base = OTHER; note = 2'-O-methyladenosine
  modified_base 40: mod_base = OTHER; note = 2'-O-methylcytidine
  modified_base 41: mod_base = OTHER; note = 2'-O-methyluridine
  modified_base 42: mod_base = OTHER; note = 2'-O-methyluridine
  modified_base 43: mod_base = OTHER; note = 2'-O-methylcytidine
  modified_base 44: mod_base = OTHER; note = 2'-O-methylcytidine
  modified_base 45: mod_base = OTHER; note = 2'-O-methyluridine
  modified_base 46: mod_base = OTHER; note = 2'-O-methylguanosine phosphorothioate
  modified_base 47: mod_base = OTHER; note = 2'-O-methylcytidine phosphorothioate
  modified_base 48: mod_base = OTHER; note = 2'-O-methylcytidine phosphorothioate
  modified_base 49: mod_base = OTHER; note = 2'-O-methylguanosine phosphorothioate
  modified_base 50: mod_base = OTHER; note = 2'-O-methylguanosine
  misc_feature 1..35: note = RNA
  misc_feature 36..38: note = DNA
  misc_feature 39..50: note = RNA
tttcttgggaatggcctgagggtcggcctcagctttncacttcctgccgg

SEQ ID NO: 188 - DNA, 50 bp, synthetic construct; identical to SEQ ID NO: 187
  source 1..50: mol_type = other DNA; note = Description of Artificial Sequence: Synthetic oligonucleotide; note = Description of Combined DNA/RNA Molecule: Synthetic oligonucleotide
  modified_base 1: mod_base = OTHER; note = 2'-O-methyluridine phosphorothioate
  modified_base 2: mod_base = OTHER; note = 2'-O-methyluridine phosphorothioate
  modified_base 3: mod_base = OTHER; note = 2'-O-methyluridine phosphorothioate
  modified_base 4: mod_base = OTHER; note = 2'-O-methylcytidine phosphorothioate
  modified_base 5: mod_base = OTHER; note = 2'-O-methyluridine
  modified_base 6: mod_base = OTHER; note = 2'-O-methyluridine
  modified_base 7: mod_base = OTHER; note = 2'-O-methylguanosine
  modified_base 8: mod_base = OTHER; note = 2'-O-methylguanosine
  modified_base 9: mod_base = OTHER; note = 2'-O-methylguanosine
  modified_base 10: mod_base = OTHER; note = 2'-O-methyladenosine
  modified_base 11: mod_base = OTHER; note = 2'-O-methyladenosine
  modified_base 12: mod_base = OTHER; note = 2'-O-methyluridine
  modified_base 13: mod_base = OTHER; note = 2'-O-methylguanosine
  modified_base 14: mod_base = OTHER; note = 2'-O-methylguanosine
  modified_base 15: mod_base = OTHER; note = 2'-O-methylcytidine
  modified_base 16: mod_base = OTHER; note = 2'-O-methylcytidine
  modified_base 17: mod_base = OTHER; note = 2'-O-methyluridine
  modified_base 18: mod_base = OTHER; note = 2'-O-methylguanosine
  modified_base 19: mod_base = OTHER; note = 2'-O-methyladenosine
  modified_base 20: mod_base = OTHER; note = 2'-O-methylguanosine
  modified_base 21: mod_base = OTHER; note = 2'-O-methylguanosine
  modified_base 22: mod_base = OTHER; note = 2'-O-methylguanosine
  modified_base 23: mod_base = OTHER; note = 2'-O-methyluridine
  modified_base 24: mod_base = OTHER; note = 2'-O-methylcytidine
  modified_base 25: mod_base = OTHER; note = 2'-O-methylguanosine
  modified_base 26: mod_base = OTHER; note = 2'-O-methylguanosine
  modified_base 27: mod_base = OTHER; note = 2'-O-methylcytidine
  modified_base 28: mod_base = OTHER; note = 2'-O-methylcytidine
  modified_base 29: mod_base = OTHER; note = 2'-O-methyluridine
  modified_base 30: mod_base = OTHER; note = 2'-O-methylcytidine
  modified_base 31: mod_base = OTHER; note = 2'-O-methyladenosine
  modified_base 32: mod_base = OTHER; note = 2'-O-methylguanosine
  modified_base 33: mod_base = OTHER; note = 2'-O-methylcytidine
  modified_base 34: mod_base = OTHER; note = 2'-O-methyluridine
  modified_base 35: mod_base = OTHER; note = 2'-O-methyluridine
  modified_base 37: mod_base = OTHER; note = Abasic nucleotide
  modified_base 39: mod_base = OTHER; note = 2'-O-methyladenosine
  modified_base 40: mod_base = OTHER; note = 2'-O-methylcytidine
  modified_base 41: mod_base = OTHER; note = 2'-O-methyluridine
  modified_base 42: mod_base = OTHER; note = 2'-O-methyluridine
  modified_base 43: mod_base = OTHER; note = 2'-O-methylcytidine
  modified_base 44: mod_base = OTHER; note = 2'-O-methylcytidine
  modified_base 45: mod_base = OTHER; note = 2'-O-methyluridine
  modified_base 46: mod_base = OTHER; note = 2'-O-methylguanosine phosphorothioate
  modified_base 47: mod_base = OTHER; note = 2'-O-methylcytidine phosphorothioate
  modified_base 48: mod_base = OTHER; note = 2'-O-methylcytidine phosphorothioate
  modified_base 49: mod_base = OTHER; note = 2'-O-methylguanosine phosphorothioate
  modified_base 50: mod_base = OTHER; note = 2'-O-methylguanosine
  misc_feature 1..35: note = RNA
  misc_feature 36: note = DNA
  misc_feature 37: note = RNA
  misc_feature 38: note = DNA
  misc_feature 39..50: note = RNA

SEQ ID NO: 189 - DNA, 50 bp, synthetic construct; identical to SEQ ID NO: 187
  source 1..50: mol_type = other DNA; note = Description of Artificial Sequence: Synthetic oligonucleotide; note = Description of Combined DNA/RNA Molecule: Synthetic oligonucleotide
  modified_base 1: mod_base = OTHER; note = 2'-O-methyluridine phosphorothioate
  modified_base 2: mod_base = OTHER; note = 2'-O-methyluridine phosphorothioate
  modified_base 3: mod_base = OTHER; note = 2'-O-methyluridine phosphorothioate
  modified_base 4: mod_base = OTHER; note = 2'-O-methylcytidine phosphorothioate
  modified_base 5: mod_base = OTHER; note = 2'-O-methyluridine
  modified_base 6: mod_base = OTHER; note = 2'-O-methyluridine
  modified_base 7: mod_base = OTHER; note = 2'-O-methylguanosine
  modified_base 8: mod_base = OTHER; note = 2'-O-methylguanosine
  modified_base 9: mod_base = OTHER; note = 2'-O-methylguanosine
  modified_base 10: mod_base = OTHER; note = 2'-O-methyladenosine
  modified_base 11: mod_base = OTHER; note = 2'-O-methyladenosine
  modified_base 12: mod_base = OTHER; note = 2'-O-methyluridine
  modified_base 13: mod_base = OTHER; note = 2'-O-methylguanosine
  modified_base 14: mod_base = OTHER; note = 2'-O-methylguanosine
  modified_base 15: mod_base = OTHER; note = 2'-O-methylcytidine
  modified_base 16: mod_base = OTHER; note = 2'-O-methylcytidine
  modified_base 17: mod_base = OTHER; note = 2'-O-methyluridine
  modified_base 18: mod_base = OTHER; note = 2'-O-methylguanosine
  modified_base 19: mod_base = OTHER; note = 2'-O-methyladenosine
  modified_base 20: mod_base = OTHER; note = 2'-O-methylguanosine
  modified_base 21: mod_base = OTHER; note = 2'-O-methylguanosine
  modified_base 22: mod_base = OTHER; note = 2'-O-methylguanosine
  modified_base 23: mod_base = OTHER; note = 2'-O-methyluridine
  modified_base 24: mod_base = OTHER; note = 2'-O-methylcytidine
  modified_base 25: mod_base = OTHER; note = 2'-O-methylguanosine
  modified_base 26: mod_base = OTHER; note = 2'-O-methylguanosine
  modified_base 27: mod_base = OTHER; note = 2'-O-methylcytidine
  modified_base 28: mod_base = OTHER; note = 2'-O-methylcytidine
  modified_base 29: mod_base = OTHER; note = 2'-O-methyluridine
  modified_base 30: mod_base = OTHER; note = 2'-O-methylcytidine
  modified_base 31: mod_base = OTHER; note = 2'-O-methyladenosine
  modified_base 32: mod_base = OTHER; note = 2'-O-methylguanosine
  modified_base 33: mod_base = OTHER; note = 2'-O-methylcytidine
  modified_base 34: mod_base = OTHER; note = 2'-O-methyluridine
  modified_base 35: mod_base = OTHER; note = 2'-O-methyluridine
  modified_base 37: mod_base = OTHER; note = 2'-OMe-Abasic nucleotide
  modified_base 39: mod_base = OTHER; note = 2'-O-methyladenosine
  modified_base 40: mod_base = OTHER; note = 2'-O-methylcytidine
  modified_base 41: mod_base = OTHER; note = 2'-O-methyluridine
  modified_base 42: mod_base = OTHER; note = 2'-O-methyluridine
  modified_base 43: mod_base = OTHER; note = 2'-O-methylcytidine
  modified_base 44: mod_base = OTHER; note = 2'-O-methylcytidine
  modified_base 45: mod_base = OTHER; note = 2'-O-methyluridine
  modified_base 46: mod_base = OTHER; note = 2'-O-methylguanosine phosphorothioate
  modified_base 47: mod_base = OTHER; note = 2'-O-methylcytidine phosphorothioate
  modified_base 48: mod_base = OTHER; note = 2'-O-methylcytidine phosphorothioate
  modified_base 49: mod_base = OTHER; note = 2'-O-methylguanosine phosphorothioate
  modified_base 50: mod_base = OTHER; note = 2'-O-methylguanosine
  misc_feature 1..35: note = RNA
  misc_feature 36: note = DNA
  misc_feature 37: note = RNA
  misc_feature 38: note = DNA
  misc_feature 39..50: note = RNA

SEQ ID NO: 190 - DNA, 50 bp, synthetic construct; identical to SEQ ID NO: 66
  source 1..50: mol_type = other DNA; note = Description of Artificial Sequence: Synthetic oligonucleotide; note = Description of Combined DNA/RNA Molecule: Synthetic oligonucleotide
  modified_base 1: mod_base = OTHER; note = 2'-O-methyluridine phosphorothioate
  modified_base 2: mod_base = OTHER; note = 2'-O-methyluridine phosphorothioate
  modified_base 3: mod_base = OTHER; note = 2'-O-methyluridine phosphorothioate
  modified_base 4: mod_base = OTHER; note = 2'-O-methylcytidine phosphorothioate
  modified_base 5: mod_base = OTHER; note = 2'-O-methyluridine
  modified_base 6: mod_base = OTHER; note = 2'-O-methyluridine
  modified_base 7: mod_base = OTHER; note = 2'-O-methylguanosine
  modified_base 8: mod_base = OTHER; note = 2'-O-methylguanosine
  modified_base 9: mod_base = OTHER; note = 2'-O-methylguanosine
  modified_base 10: mod_base = OTHER; note = 2'-O-methyladenosine
  modified_base 11: mod_base = OTHER; note = 2'-O-methyladenosine
  modified_base 12: mod_base = OTHER; note = 2'-O-methyluridine
  modified_base 13: mod_base = OTHER; note = 2'-O-methylguanosine
  modified_base 14: mod_base = OTHER; note = 2'-O-methylguanosine
  modified_base 15: mod_base = OTHER; note = 2'-O-methylcytidine
  modified_base 16: mod_base = OTHER; note = 2'-O-methylcytidine
  modified_base 17: mod_base = OTHER; note = 2'-O-methyluridine
  modified_base 18: mod_base = OTHER; note = 2'-O-methylguanosine
  modified_base 19: mod_base = OTHER; note = 2'-O-methyladenosine
  modified_base 20: mod_base = OTHER; note = 2'-O-methylguanosine
  modified_base 21: mod_base = OTHER; note = 2'-O-methylguanosine
  modified_base 22: mod_base = OTHER; note = 2'-O-methylguanosine
  modified_base 23: mod_base = OTHER; note = 2'-O-methyluridine
  modified_base 24: mod_base = OTHER; note = 2'-O-methylcytidine
  modified_base 25: mod_base = OTHER; note = 2'-O-methylguanosine
  modified_base 26: mod_base = OTHER; note = 2'-O-methylguanosine
  modified_base 27: mod_base = OTHER; note = 2'-O-methylcytidine
  modified_base 28: mod_base = OTHER; note = 2'-O-methylcytidine
  modified_base 29: mod_base = OTHER; note = 2'-O-methyluridine
  modified_base 30: mod_base = OTHER; note = 2'-O-methylcytidine
  modified_base 31: mod_base = OTHER; note = 2'-O-methyladenosine
  modified_base 32: mod_base = OTHER; note = 2'-O-methylguanosine
  modified_base 33: mod_base = OTHER; note = 2'-O-methylcytidine
  modified_base 34: mod_base = OTHER; note = 2'-O-methyluridine
  modified_base 35: mod_base = OTHER; note = 2'-O-methyluridine
  modified_base 36: mod_base = OTHER; note = (S)-glycol thymidine
  modified_base 39: mod_base = OTHER; note = 2'-O-methyladenosine
  modified_base 40: mod_base = OTHER; note = 2'-O-methylcytidine
  modified_base 41: mod_base = OTHER; note = 2'-O-methyluridine
  modified_base 42: mod_base = OTHER; note = 2'-O-methyluridine
  modified_base 43: mod_base = OTHER; note = 2'-O-methylcytidine
  modified_base 44: mod_base = OTHER; note = 2'-O-methylcytidine
  modified_base 45: mod_base = OTHER; note = 2'-O-methyluridine
  modified_base 46: mod_base = OTHER; note = 2'-O-methylguanosine phosphorothioate
  modified_base 47: mod_base = OTHER; note = 2'-O-methylcytidine phosphorothioate
  modified_base 48: mod_base = OTHER; note = 2'-O-methylcytidine phosphorothioate
  modified_base 49: mod_base = OTHER; note = 2'-O-methylguanosine phosphorothioate
  modified_base 50: mod_base = OTHER; note = 2'-O-methylguanosine
  misc_feature 1..36: note = RNA
  misc_feature 37..38: note = DNA
  misc_feature 39..50: note = RNA

SEQ ID NO: 191 - DNA, 50 bp, synthetic construct; identical to SEQ ID NO: 66
  source 1..50: mol_type = other DNA; note = Description of Artificial Sequence: Synthetic oligonucleotide; note = Description of Combined DNA/RNA Molecule: Synthetic oligonucleotide
  modified_base 1: mod_base = OTHER; note = 2'-O-methyluridine phosphorothioate
  modified_base 2: mod_base = OTHER; note = 2'-O-methyluridine phosphorothioate
  modified_base 3: mod_base = OTHER; note = 2'-O-methyluridine phosphorothioate
  modified_base 4: mod_base = OTHER; note = 2'-O-methylcytidine phosphorothioate
  modified_base 5: mod_base = OTHER; note = 2'-O-methyluridine
  modified_base 6: mod_base = OTHER; note = 2'-O-methyluridine
  modified_base 7: mod_base = OTHER; note = 2'-O-methylguanosine
  modified_base 8: mod_base = OTHER; note = 2'-O-methylguanosine
  modified_base 9: mod_base = OTHER; note = 2'-O-methylguanosine
  modified_base 10: mod_base = OTHER; note = 2'-O-methyladenosine
  modified_base 11: mod_base = OTHER; note = 2'-O-methyladenosine
  modified_base 12: mod_base = OTHER; note = 2'-O-methyluridine
  modified_base 13: mod_base = OTHER; note = 2'-O-methylguanosine
  modified_base 14: mod_base = OTHER; note = 2'-O-methylguanosine
  modified_base 15: mod_base = OTHER; note = 2'-O-methylcytidine
  modified_base 16: mod_base = OTHER; note = 2'-O-methylcytidine
  modified_base 17: mod_base = OTHER; note = 2'-O-methyluridine
  modified_base 18: mod_base = OTHER; note = 2'-O-methylguanosine
  modified_base 19: mod_base = OTHER; note = 2'-O-methyladenosine
  modified_base 20: mod_base = OTHER; note = 2'-O-methylguanosine
  modified_base 21: mod_base = OTHER; note = 2'-O-methylguanosine
  modified_base 22: mod_base = OTHER; note = 2'-O-methylguanosine
  modified_base 23: mod_base = OTHER; note = 2'-O-methyluridine
  modified_base 24: mod_base = OTHER; note = 2'-O-methylcytidine
  modified_base 25: mod_base = OTHER; note = 2'-O-methylguanosine
  modified_base 26: mod_base = OTHER; note = 2'-O-methylguanosine
  modified_base 27: mod_base = OTHER; note = 2'-O-methylcytidine
  modified_base 28: mod_base = OTHER; note = 2'-O-methylcytidine
  modified_base 29: mod_base = OTHER; note = 2'-O-methyluridine
  modified_base 30: mod_base = OTHER; note = 2'-O-methylcytidine
  modified_base 31: mod_base = OTHER; note = 2'-O-methyladenosine
  modified_base 32: mod_base = OTHER; note = 2'-O-methylguanosine
  modified_base 33: mod_base = OTHER; note = 2'-O-methylcytidine
  modified_base 34: mod_base = OTHER; note = 2'-O-methyluridine
  modified_base 35: mod_base = OTHER; note = 2'-O-methyluridine
  modified_base 37: mod_base = OTHER; note = (S)-glycol cytidine
  modified_base 39: mod_base = OTHER; note = 2'-O-methyladenosine
  modified_base 40: mod_base = OTHER; note = 2'-O-methylcytidine
  modified_base 41: mod_base = OTHER; note = 2'-O-methyluridine
  modified_base 42: mod_base = OTHER; note = 2'-O-methyluridine
  modified_base 43: mod_base = OTHER; note = 2'-O-methylcytidine
  modified_base 44: mod_base = OTHER; note = 2'-O-methylcytidine
  modified_base 45: mod_base = OTHER; note = 2'-O-methyluridine
  modified_base 46: mod_base = OTHER; note = 2'-O-methylguanosine phosphorothioate
  modified_base 47: mod_base = OTHER; note = 2'-O-methylcytidine phosphorothioate
  modified_base 48: mod_base = OTHER; note = 2'-O-methylcytidine phosphorothioate
  modified_base 49: mod_base = OTHER; note = 2'-O-methylguanosine phosphorothioate
  modified_base 50: mod_base = OTHER; note = 2'-O-methylguanosine
  misc_feature 1..35: note = RNA
  misc_feature 36: note = DNA
  misc_feature 37: note = RNA
  misc_feature 38: note = DNA
  misc_feature 39..50: note = RNA

SEQ ID NO: 192 - DNA, 50 bp, synthetic construct; identical to SEQ ID NO: 66
  source 1..50: mol_type = other DNA; note = Description of Artificial Sequence: Synthetic oligonucleotide; note = Description of Combined DNA/RNA Molecule: Synthetic oligonucleotide
  modified_base 1: mod_base = OTHER; note = 2'-O-methyluridine phosphorothioate
  modified_base 2: mod_base = OTHER; note = 2'-O-methyluridine phosphorothioate
  modified_base 3: mod_base = OTHER; note = 2'-O-methyluridine phosphorothioate
  modified_base 4: mod_base = OTHER; note = 2'-O-methylcytidine phosphorothioate
  modified_base 5: mod_base = OTHER; note = 2'-O-methyluridine
  modified_base 6: mod_base = OTHER; note = 2'-O-methyluridine
  modified_base 7: mod_base = OTHER; note = 2'-O-methylguanosine
  modified_base 8: mod_base = OTHER; note = 2'-O-methylguanosine
  modified_base 9: mod_base = OTHER; note = 2'-O-methylguanosine
  modified_base 10: mod_base = OTHER; note = 2'-O-methyladenosine
  modified_base 11: mod_base = OTHER; note = 2'-O-methyladenosine
  modified_base 12: mod_base = OTHER; note = 2'-O-methyluridine
  modified_base 13: mod_base = OTHER; note = 2'-O-methylguanosine
  modified_base 14: mod_base = OTHER; note = 2'-O-methylguanosine
  modified_base 15: mod_base = OTHER; note = 2'-O-methylcytidine
  modified_base 16: mod_base = OTHER; note = 2'-O-methylcytidine
  modified_base 17: mod_base = OTHER; note = 2'-O-methyluridine
  modified_base 18: mod_base = OTHER; note = 2'-O-methylguanosine
  modified_base 19: mod_base = OTHER; note = 2'-O-methyladenosine
  modified_base 20: mod_base = OTHER; note = 2'-O-methylguanosine
  modified_base 21: mod_base = OTHER; note = 2'-O-methylguanosine
  modified_base 22: mod_base = OTHER; note = 2'-O-methylguanosine
  modified_base 23: mod_base = OTHER; note = 2'-O-methyluridine
  modified_base 24: mod_base = OTHER; note = 2'-O-methylcytidine
  modified_base 25: mod_base = OTHER; note = 2'-O-methylguanosine
  modified_base 26: mod_base = OTHER; note = 2'-O-methylguanosine
  modified_base 27: mod_base = OTHER; note = 2'-O-methylcytidine
  modified_base 28: mod_base = OTHER; note = 2'-O-methylcytidine
  modified_base 29: mod_base = OTHER; note = 2'-O-methyluridine
  modified_base 30: mod_base = OTHER; note = 2'-O-methylcytidine
  modified_base 31: mod_base = OTHER; note = 2'-O-methyladenosine
  modified_base 32: mod_base = OTHER; note = 2'-O-methylguanosine
  modified_base 33: mod_base = OTHER; note = 2'-O-methylcytidine
  modified_base 34: mod_base = OTHER; note = 2'-O-methyluridine
  modified_base 35: mod_base = OTHER; note = 2'-O-methyluridine
  modified_base 36: mod_base = OTHER; note = (S)-glycol thymidine
  modified_base 37: mod_base = OTHER; note = (S)-glycol cytidine
  modified_base 39: mod_base = OTHER; note = 2'-O-methyladenosine
  modified_base 40: mod_base = OTHER; note = 2'-O-methylcytidine
  modified_base 41: mod_base = OTHER; note = 2'-O-methyluridine
  modified_base 42: mod_base = OTHER; note = 2'-O-methyluridine
  modified_base 43: mod_base = OTHER; note = 2'-O-methylcytidine
  modified_base 44: mod_base = OTHER; note = 2'-O-methylcytidine
  modified_base 45: mod_base = OTHER; note = 2'-O-methyluridine
  modified_base 46: mod_base = OTHER; note = 2'-O-methylguanosine phosphorothioate
  modified_base 47: mod_base = OTHER; note = 2'-O-methylcytidine phosphorothioate
  modified_base 48: mod_base = OTHER; note = 2'-O-methylcytidine phosphorothioate
  modified_base 49: mod_base = OTHER; note = 2'-O-methylguanosine phosphorothioate
  modified_base 50: mod_base = OTHER; note = 2'-O-methylguanosine
  misc_feature 1..37: note = RNA
  misc_feature 38: note = DNA
  misc_feature 39..50: note = RNA

SEQ ID NO: 193 - DNA, 50 bp, synthetic construct; identical to SEQ ID NO: 66
  source 1..50: mol_type = other DNA; note = Description of Artificial Sequence: Synthetic oligonucleotide; note = Description of Combined DNA/RNA Molecule: Synthetic oligonucleotide
  modified_base 1: mod_base = OTHER; note = 2'-O-methyluridine phosphorothioate
  modified_base 2: mod_base = OTHER; note = 2'-O-methyluridine phosphorothioate
  modified_base 3: mod_base = OTHER; note = 2'-O-methyluridine phosphorothioate
  modified_base 4: mod_base = OTHER; note = 2'-O-methylcytidine phosphorothioate
  modified_base 5: mod_base = OTHER; note = 2'-O-methyluridine
  modified_base 6: mod_base = OTHER; note = 2'-O-methyluridine
  modified_base 7: mod_base = OTHER; note = 2'-O-methylguanosine
  modified_base 8: mod_base = OTHER; note = 2'-O-methylguanosine
  modified_base 9: mod_base = OTHER; note = 2'-O-methylguanosine
  modified_base 10: mod_base = OTHER; note = 2'-O-methyladenosine
  modified_base 11: mod_base = OTHER; note = 2'-O-methyladenosine
  modified_base 12: mod_base = OTHER; note = 2'-O-methyluridine
  modified_base 13: mod_base = OTHER; note = 2'-O-methylguanosine
  modified_base 14: mod_base = OTHER; note = 2'-O-methylguanosine
  modified_base 15: mod_base = OTHER; note = 2'-O-methylcytidine
  modified_base 16: mod_base = OTHER; note = 2'-O-methylcytidine
  modified_base 17: mod_base = OTHER; note = 2'-O-methyluridine
  modified_base 18: mod_base = OTHER; note = 2'-O-methylguanosine
  modified_base 19: mod_base = OTHER; note = 2'-O-methyladenosine
  modified_base 20: mod_base = OTHER; note = 2'-O-methylguanosine
  modified_base 21: mod_base = OTHER; note = 2'-O-methylguanosine
  modified_base 22: mod_base = OTHER; note = 2'-O-methylguanosine
  modified_base 23: mod_base = OTHER; note = 2'-O-methyluridine
  modified_base 24: mod_base = OTHER; note = 2'-O-methylcytidine
  modified_base 25: mod_base = OTHER; note = 2'-O-methylguanosine
  modified_base 26: mod_base = OTHER; note = 2'-O-methylguanosine
  modified_base 27: mod_base = OTHER; note = 2'-O-methylcytidine
  modified_base 28: mod_base = OTHER; note = 2'-O-methylcytidine
  modified_base 29: mod_base = OTHER; note = 2'-O-methyluridine
  modified_base 30: mod_base = OTHER; note = 2'-O-methylcytidine
  modified_base 31: mod_base = OTHER; note = 2'-O-methyladenosine
  modified_base 32: mod_base = OTHER; note = 2'-O-methylguanosine
  modified_base 33: mod_base = OTHER; note = 2'-O-methylcytidine
  modified_base 34: mod_base = OTHER; note = 2'-O-methyluridine
  modified_base 35: mod_base = OTHER; note = 2'-O-methyluridine
  modified_base 36: mod_base = OTHER; note = (R)-glycol thymidine
  modified_base 39: mod_base = OTHER; note = 2'-O-methyladenosine
  modified_base 40: mod_base = OTHER; note = 2'-O-methylcytidine
  modified_base 41: mod_base = OTHER; note = 2'-O-methyluridine
  modified_base 42: mod_base = OTHER; note = 2'-O-methyluridine
  modified_base 43: mod_base = OTHER; note = 2'-O-methylcytidine
  modified_base 44: mod_base = OTHER; note = 2'-O-methylcytidine
  modified_base 45: mod_base = OTHER; note = 2'-O-methyluridine
  modified_base 46: mod_base = OTHER; note = 2'-O-methylguanosine phosphorothioate
  modified_base 47: mod_base = OTHER; note = 2'-O-methylcytidine phosphorothioate
  modified_base 48: mod_base = OTHER; note = 2'-O-methylcytidine phosphorothioate
  modified_base 49: mod_base = OTHER; note = 2'-O-methylguanosine phosphorothioate
  modified_base 50: mod_base = OTHER; note = 2'-O-methylguanosine
  misc_feature 1..36: note = RNA
  misc_feature 37..38: note = DNA
  misc_feature 39..50: note = RNA

SEQ ID NO: 194 - DNA, 50 bp, synthetic construct; identical to SEQ ID NO: 66
  source 1..50: mol_type = other DNA; note = Description of Artificial Sequence: Synthetic oligonucleotide; note = Description of Combined DNA/RNA Molecule: Synthetic oligonucleotide
  modified_base 1: mod_base = OTHER; note = 2'-O-methyluridine phosphorothioate
  modified_base 2: mod_base = OTHER; note = 2'-O-methyluridine phosphorothioate
  modified_base 3: mod_base = OTHER; note = 2'-O-methyluridine phosphorothioate
  modified_base 4: mod_base = OTHER; note = 2'-O-methylcytidine phosphorothioate
  modified_base 5: mod_base = OTHER; note = 2'-O-methyluridine
  modified_base 6: mod_base = OTHER; note = 2'-O-methyluridine
  modified_base 7: mod_base = OTHER; note = 2'-O-methylguanosine
  modified_base 8: mod_base = OTHER; note = 2'-O-methylguanosine
  modified_base 9: mod_base = OTHER; note = 2'-O-methylguanosine
  modified_base 10: mod_base = OTHER; note = 2'-O-methyladenosine
  modified_base 11: mod_base = OTHER; note = 2'-O-methyladenosine
  modified_base 12: mod_base = OTHER; note = 2'-O-methyluridine
  modified_base 13: mod_base = OTHER; note = 2'-O-methylguanosine
  modified_base 14: mod_base = OTHER; note = 2'-O-methylguanosine
  modified_base 15: mod_base = OTHER; note = 2'-O-methylcytidine
  modified_base 16: mod_base = OTHER; note = 2'-O-methylcytidine
  modified_base 17: mod_base = OTHER; note = 2'-O-methyluridine
  modified_base 18: mod_base = OTHER; note = 2'-O-methylguanosine
  modified_base 19: mod_base = OTHER; note = 2'-O-methyladenosine
  modified_base 20: mod_base = OTHER; note = 2'-O-methylguanosine
  modified_base 21: mod_base = OTHER; note = 2'-O-methylguanosine
  modified_base 22: mod_base = OTHER; note = 2'-O-methylguanosine
  modified_base 23: mod_base = OTHER; note = 2'-O-methyluridine
  modified_base 24: mod_base = OTHER; note = 2'-O-methylcytidine
  modified_base 25: mod_base = OTHER; note = 2'-O-methylguanosine
  modified_base 26: mod_base = OTHER; note = 2'-O-methylguanosine
  modified_base 27: mod_base = OTHER; note = 2'-O-methylcytidine
  modified_base 28: mod_base = OTHER; note = 2'-O-methylcytidine
  modified_base 29: mod_base = OTHER; note = 2'-O-methyluridine
  modified_base 30: mod_base = OTHER; note = 2'-O-methylcytidine
  modified_base 31: mod_base = OTHER; note = 2'-O-methyladenosine
  modified_base 32: mod_base = OTHER; note = 2'-O-methylguanosine
  modified_base 33: mod_base = OTHER; note = 2'-O-methylcytidine
  modified_base 34: mod_base = OTHER; note = 2'-O-methyluridine
  modified_base 35: mod_base = OTHER; note = 2'-O-methyluridine
  modified_base 37: mod_base = OTHER; note = (R)-glycol cytidine
  modified_base 39: mod_base = OTHER; note = 2'-O-methyladenosine
  modified_base 40: mod_base = OTHER; note = 2'-O-methylcytidine
  modified_base 41: mod_base = OTHER; note = 2'-O-methyluridine
  modified_base 42: mod_base = OTHER; note = 2'-O-methyluridine
  modified_base 43: mod_base = OTHER; note = 2'-O-methylcytidine
  modified_base 44: mod_base = OTHER; note = 2'-O-methylcytidine
  modified_base 45: mod_base = OTHER; note = 2'-O-methyluridine
  modified_base 46: mod_base = OTHER; note = 2'-O-methylguanosine phosphorothioate
  modified_base 47: mod_base = OTHER; note = 2'-O-methylcytidine phosphorothioate
  modified_base 48: mod_base = OTHER; note = 2'-O-methylcytidine phosphorothioate
  modified_base 49: mod_base = OTHER; note = 2'-O-methylguanosine phosphorothioate
  modified_base 50: mod_base = OTHER; note = 2'-O-methylguanosine
  misc_feature 1..35: note = RNA
  misc_feature 36: note = DNA
  misc_feature 37: note = RNA
  misc_feature 38: note = DNA
  misc_feature 39..50: note = RNA

SEQ ID NO: 195 - DNA, 50 bp, synthetic construct; identical to SEQ ID NO: 66
  source 1..50: mol_type = other DNA; note = Description of Artificial Sequence: Synthetic oligonucleotide; note = Description of Combined DNA/RNA Molecule: Synthetic oligonucleotide
  modified_base 1: mod_base = OTHER; note = 2'-O-methyluridine phosphorothioate
  modified_base 2: mod_base = OTHER; note = 2'-O-methyluridine phosphorothioate
  modified_base 3: mod_base = OTHER; note = 2'-O-methyluridine phosphorothioate
  modified_base 4: mod_base = OTHER; note = 2'-O-methylcytidine phosphorothioate
  modified_base 5: mod_base = OTHER; note = 2'-O-methyluridine
  modified_base 6: mod_base = OTHER; note = 2'-O-methyluridine
  modified_base 7: mod_base = OTHER; note = 2'-O-methylguanosine
  modified_base 8: mod_base = OTHER; note = 2'-O-methylguanosine
  modified_base 9: mod_base = OTHER; note = 2'-O-methylguanosine
  modified_base 10: mod_base = OTHER; note = 2'-O-methyladenosine
  modified_base 11: mod_base = OTHER; note = 2'-O-methyladenosine
  modified_base 12: mod_base = OTHER; note = 2'-O-methyluridine
  modified_base 13: mod_base = OTHER; note = 2'-O-methylguanosine
  modified_base 14: mod_base = OTHER; note = 2'-O-methylguanosine
  modified_base 15: mod_base = OTHER; note = 2'-O-methylcytidine
  modified_base 16: mod_base = OTHER; note = 2'-O-methylcytidine
  modified_base 17: mod_base = OTHER; note = 2'-O-methyluridine
  modified_base 18: mod_base = OTHER; note = 2'-O-methylguanosine
  modified_base 19: mod_base = OTHER; note = 2'-O-methyladenosine
  modified_base 20: mod_base = OTHER; note = 2'-O-methylguanosine
  modified_base 21: mod_base = OTHER; note = 2'-O-methylguanosine
  modified_base 22: mod_base = OTHER; note = 2'-O-methylguanosine
  modified_base 23: mod_base = OTHER; note = 2'-O-methyluridine
  modified_base 24: mod_base = OTHER; note = 2'-O-methylcytidine
  modified_base 25: mod_base = OTHER; note = 2'-O-methylguanosine
  modified_base 26: mod_base = OTHER; note = 2'-O-methylguanosine
  modified_base 27: mod_base = OTHER; note = 2'-O-methylcytidine
  modified_base 28: mod_base = OTHER; note = 2'-O-methylcytidine
  modified_base 29: mod_base = OTHER; note = 2'-O-methyluridine
  modified_base 30: mod_base = OTHER; note = 2'-O-methylcytidine
  modified_base 31: mod_base = OTHER; note = 2'-O-methyladenosine
  modified_base 32: mod_base = OTHER; note = 2'-O-methylguanosine
  modified_base 33: mod_base = OTHER; note = 2'-O-methylcytidine
  modified_base 34: mod_base = OTHER; note = 2'-O-methyluridine
  modified_base 35: mod_base = OTHER; note = 2'-O-methyluridine
  modified_base 38: mod_base = OTHER; note = (R)-glycol cytidine
  modified_base 39: mod_base = OTHER; note = 2'-O-methyladenosine
  modified_base 40: mod_base = OTHER; note = 2'-O-methylcytidine
  modified_base 41: mod_base = OTHER; note = 2'-O-methyluridine
  modified_base 42: mod_base = OTHER; note = 2'-O-methyluridine
  modified_base 43: mod_base = OTHER; note = 2'-O-methylcytidine
  modified_base 44: mod_base = OTHER; note = 2'-O-methylcytidine
  modified_base 45: mod_base = OTHER; note = 2'-O-methyluridine
  modified_base 46: mod_base = OTHER; note = 2'-O-methylguanosine phosphorothioate
  modified_base 47: mod_base = OTHER; note = 2'-O-methylcytidine phosphorothioate
  modified_base 48: mod_base = OTHER; note = 2'-O-methylcytidine phosphorothioate
  modified_base 49: mod_base = OTHER; note = 2'-O-methylguanosine phosphorothioate
  modified_base 50: mod_base = OTHER; note = 2'-O-methylguanosine
  misc_feature 1..35: note = RNA
  misc_feature 36..37: note = DNA
  misc_feature 38..50: note = RNA

SEQ ID NO: 196 - DNA, 50 bp, synthetic construct; identical to SEQ ID NO: 66
  source 1..50: mol_type = other DNA; note = Description of Artificial Sequence: Synthetic oligonucleotide; note = Description of Combined DNA/RNA Molecule: Synthetic oligonucleotide
  modified_base 1: mod_base = OTHER; note = 2'-O-methyluridine phosphorothioate
  modified_base 2: mod_base = OTHER; note = 2'-O-methyluridine phosphorothioate
  modified_base 3: mod_base = OTHER; note = 2'-O-methyluridine phosphorothioate
  modified_base 4: mod_base = OTHER; note = 2'-O-methylcytidine phosphorothioate
  modified_base 5: mod_base = OTHER; note = 2'-O-methyluridine
  modified_base 6: mod_base = OTHER; note = 2'-O-methyluridine
  modified_base 7: mod_base = OTHER; note = 2'-O-methylguanosine
  modified_base 8: mod_base = OTHER; note = 2'-O-methylguanosine
  modified_base 9: mod_base = OTHER; note = 2'-O-methylguanosine
  modified_base 10: mod_base = OTHER; note = 2'-O-methyladenosine
  modified_base 11: mod_base = OTHER; note = 2'-O-methyladenosine
  modified_base 12: mod_base = OTHER; note = 2'-O-methyluridine
  modified_base 13: mod_base = OTHER; note = 2'-O-methylguanosine
  modified_base 14: mod_base = OTHER; note = 2'-O-methylguanosine
  modified_base 15: mod_base = OTHER; note = 2'-O-methylcytidine
  modified_base 16: mod_base = OTHER; note = 2'-O-methylcytidine
  modified_base 17: mod_base = OTHER; note = 2'-O-methyluridine
  modified_base 18: mod_base = OTHER; note = 2'-O-methylguanosine
  modified_base 19: mod_base = OTHER; note = 2'-O-methyladenosine
  modified_base 20: mod_base = OTHER; note = 2'-O-methylguanosine
  modified_base 21: mod_base = OTHER; note = 2'-O-methylguanosine
  modified_base 22: mod_base = OTHER; note = 2'-O-methylguanosine
  modified_base 23: mod_base = OTHER; note = 2'-O-methyluridine
  modified_base 24: mod_base = OTHER; note = 2'-O-methylcytidine
  modified_base 25: mod_base = OTHER; note = 2'-O-methylguanosine
  modified_base 26: mod_base = OTHER; note = 2'-O-methylguanosine
  modified_base 27: mod_base = OTHER; note = 2'-O-methylcytidine
  modified_base 28: mod_base = OTHER; note = 2'-O-methylcytidine
  modified_base 29: mod_base = OTHER; note = 2'-O-methyluridine
  modified_base 30: mod_base = OTHER; note = 2'-O-methylcytidine
  modified_base 31: mod_base = OTHER; note = 2'-O-methyladenosine
  modified_base 32: mod_base = OTHER; note = 2'-O-methylguanosine
  modified_base 33: mod_base = OTHER; note = 2'-O-methylcytidine
  modified_base 34: mod_base = OTHER; note = 2'-O-methyluridine
  modified_base 35: mod_base = OTHER; note = 2'-O-methyluridine
  modified_base 36: mod_base = OTHER; note = Serinol thymidine
  modified_base 39: mod_base = OTHER; note = 2'-O-methyladenosine
  modified_base 40: mod_base = OTHER; note = 2'-O-methylcytidine
  modified_base 41: mod_base = OTHER; note = 2'-O-methyluridine
  modified_base 42: mod_base = OTHER; note = 2'-O-methyluridine
  modified_base 43: mod_base = OTHER; note = 2'-O-methylcytidine
  modified_base 44: mod_base = OTHER; note = 2'-O-methylcytidine
  modified_base 45: mod_base = OTHER; note = 2'-O-methyluridine
  modified_base 46: mod_base = OTHER; note = 2'-O-methylguanosine phosphorothioate
  modified_base 47: mod_base = OTHER; note = 2'-O-methylcytidine phosphorothioate
  modified_base 48: mod_base = OTHER; note = 2'-O-methylcytidine phosphorothioate
  modified_base 49: mod_base = OTHER; note = 2'-O-methylguanosine phosphorothioate
  modified_base 50: mod_base = OTHER; note = 2'-O-methylguanosine
  misc_feature 1..36: note = RNA
  misc_feature 37..38: note = DNA
  misc_feature 39..50: note = RNA

SEQ ID NO: 197 - DNA, 50 bp, synthetic construct; identical to SEQ ID NO: 66
  source 1..50: mol_type = other DNA; note = Description of Artificial Sequence: Synthetic oligonucleotide; note = Description of Combined DNA/RNA Molecule: Synthetic oligonucleotide
  modified_base 1: mod_base = OTHER; note = 2'-O-methyluridine phosphorothioate
  modified_base 2: mod_base = OTHER; note = 2'-O-methyluridine phosphorothioate
  modified_base 3: mod_base = OTHER; note = 2'-O-methyluridine phosphorothioate
  modified_base 4: mod_base = OTHER; note = 2'-O-methylcytidine phosphorothioate
  modified_base 5: mod_base = OTHER; note = 2'-O-methyluridine
  modified_base 6: mod_base = OTHER; note = 2'-O-methyluridine
  modified_base 7: mod_base = OTHER; note = 2'-O-methylguanosine
  modified_base 8: mod_base = OTHER; note = 2'-O-methylguanosine
  modified_base 9: mod_base = OTHER; note = 2'-O-methylguanosine
  modified_base 10: mod_base = OTHER; note = 2'-O-methyladenosine
  modified_base 11: mod_base = OTHER; note = 2'-O-methyladenosine
  modified_base 12: mod_base = OTHER; note = 2'-O-methyluridine
  modified_base 13: mod_base = OTHER; note = 2'-O-methylguanosine
  modified_base 14: mod_base = OTHER; note = 2'-O-methylguanosine
  modified_base 15: mod_base = OTHER; note = 2'-O-methylcytidine
  modified_base 16: mod_base = OTHER; note = 2'-O-methylcytidine
  modified_base 17: mod_base = OTHER; note = 2'-O-methyluridine
  modified_base 18: mod_base = OTHER; note = 2'-O-methylguanosine
  modified_base 19: mod_base = OTHER; note = 2'-O-methyladenosine
  modified_base 20: mod_base = OTHER; note = 2'-O-methylguanosine
  modified_base 21: mod_base = OTHER; note = 2'-O-methylguanosine
  modified_base 22: mod_base = OTHER; note = 2'-O-methylguanosine
  modified_base 23: mod_base = OTHER; note = 2'-O-methyluridine
  modified_base 24: mod_base = OTHER; note = 2'-O-methylcytidine
  modified_base 25: mod_base = OTHER; note = 2'-O-methylguanosine
  modified_base 26: mod_base = OTHER; note = 2'-O-methylguanosine
  modified_base 27: mod_base = OTHER; note = 2'-O-methylcytidine
  modified_base 28: mod_base = OTHER; note = 2'-O-methylcytidine
  modified_base 29: mod_base = OTHER; note = 2'-O-methyluridine
  modified_base 30: mod_base = OTHER; note = 2'-O-methylcytidine
  modified_base 31: mod_base = OTHER; note = 2'-O-methyladenosine
  modified_base 32: mod_base = OTHER; note = 2'-O-methylguanosine
  modified_base 33: mod_base = OTHER; note = 2'-O-methylcytidine
  modified_base 34: mod_base = OTHER; note = 2'-O-methyluridine
  modified_base 35: mod_base = OTHER; note = 2'-O-methyluridine
  modified_base 37: mod_base = OTHER; note = Serinol cytidine
  modified_base 39: mod_base = OTHER; note = 2'-O-methyladenosine
  modified_base 40: mod_base = OTHER; note = 2'-O-methylcytidine
  modified_base 41: mod_base = OTHER; note = 2'-O-methyluridine
  modified_base 42: mod_base = OTHER; note = 2'-O-methyluridine
  modified_base 43: mod_base = OTHER; note = 2'-O-methylcytidine
  modified_base 44: mod_base = OTHER; note = 2'-O-methylcytidine
  modified_base 45: mod_base = OTHER; note = 2'-O-methyluridine
  modified_base 46: mod_base = OTHER; note = 2'-O-methylguanosine phosphorothioate
  modified_base 47: mod_base = OTHER; note = 2'-O-methylcytidine phosphorothioate
  modified_base 48: mod_base = OTHER; note = 2'-O-methylcytidine phosphorothioate
  modified_base 49: mod_base = OTHER; note = 2'-O-methylguanosine phosphorothioate
  modified_base 50: mod_base = OTHER; note = 2'-O-methylguanosine
  misc_feature 1..35: note = RNA
  misc_feature 36: note = DNA
  misc_feature 37: note = RNA
  misc_feature 38: note = DNA
  misc_feature 39..50: note = RNA

SEQ ID NO: 198 - DNA, 50 bp, synthetic construct; identical to SEQ ID NO: 66
  source 1..50: mol_type = other DNA; note = Description of Artificial Sequence: Synthetic oligonucleotide; note = Description of Combined DNA/RNA Molecule: Synthetic oligonucleotide
  modified_base 1: mod_base = OTHER; note = 2'-O-methyluridine phosphorothioate
  modified_base 2: mod_base = OTHER; note = 2'-O-methyluridine phosphorothioate
  modified_base 3: mod_base = OTHER; note = 2'-O-methyluridine phosphorothioate
  modified_base 4: mod_base = OTHER; note = 2'-O-methylcytidine phosphorothioate
  modified_base 5: mod_base = OTHER; note = 2'-O-methyluridine
  modified_base 6: mod_base = OTHER; note = 2'-O-methyluridine
  modified_base 7: mod_base = OTHER; note = 2'-O-methylguanosine
  modified_base 8: mod_base = OTHER; note = 2'-O-methylguanosine
  modified_base 9: mod_base = OTHER; note = 2'-O-methylguanosine
  modified_base 10: mod_base = OTHER; note = 2'-O-methyladenosine
  modified_base 11: mod_base = OTHER; note = 2'-O-methyladenosine
  modified_base 12: mod_base = OTHER; note = 2'-O-methyluridine
  modified_base 13: mod_base = OTHER; note = 2'-O-methylguanosine
  modified_base 14: mod_base = OTHER; note = 2'-O-methylguanosine
  modified_base 15: mod_base = OTHER; note = 2'-O-methylcytidine
  modified_base 16: mod_base = OTHER; note = 2'-O-methylcytidine
  modified_base 17: mod_base = OTHER; note = 2'-O-methyluridine
  modified_base 18: mod_base = OTHER; note = 2'-O-methylguanosine
  modified_base 19: mod_base = OTHER; note = 2'-O-methyladenosine
  modified_base 20: mod_base = OTHER; note = 2'-O-methylguanosine
  modified_base 21: mod_base = OTHER; note = 2'-O-methylguanosine
  modified_base 22: mod_base = OTHER; note = 2'-O-methylguanosine
  modified_base 23: mod_base = OTHER; note = 2'-O-methyluridine
  modified_base 24: mod_base = OTHER; note = 2'-O-methylcytidine
  modified_base 25: mod_base = OTHER; note = 2'-O-methylguanosine
  modified_base 26: mod_base = OTHER; note = 2'-O-methylguanosine
  modified_base 27: mod_base = OTHER; note = 2'-O-methylcytidine
  modified_base 28: mod_base = OTHER; note = 2'-O-methylcytidine
  modified_base 29: mod_base = OTHER; note = 2'-O-methyluridine
  modified_base 30: mod_base = OTHER; note = 2'-O-methylcytidine
  modified_base 31: mod_base = OTHER; note = 2'-O-methyladenosine
  modified_base 32: mod_base = OTHER; note = 2'-O-methylguanosine
  modified_base 33: mod_base = OTHER; note = 2'-O-methylcytidine
  modified_base 34: mod_base = OTHER; note = 2'-O-methyluridine
  modified_base 35: mod_base = OTHER; note = 2'-O-methyluridine
  modified_base 38: mod_base = OTHER; note = Serinol cytidine
  modified_base 39: mod_base = OTHER; note = 2'-O-methyladenosine
  modified_base 40: mod_base = OTHER; note = 2'-O-methylcytidine
  modified_base 41: mod_base = OTHER; note = 2'-O-methyluridine
  modified_base 42: mod_base = OTHER; note = 2'-O-methyluridine
  modified_base 43: mod_base = OTHER; note = 2'-O-methylcytidine
  modified_base 44: mod_base = OTHER; note = 2'-O-methylcytidine
  modified_base 45: mod_base = OTHER; note = 2'-O-methyluridine
  modified_base 46: mod_base = OTHER; note = 2'-O-methylguanosine phosphorothioate
  modified_base 47: mod_base = OTHER; note = 2'-O-methylcytidine phosphorothioate
  modified_base 48: mod_base = OTHER; note = 2'-O-methylcytidine phosphorothioate
  modified_base 49: mod_base = OTHER; note = 2'-O-methylguanosine phosphorothioate
  modified_base 50: mod_base = OTHER; note = 2'-O-methylguanosine
  misc_feature 1..35: note = RNA
  misc_feature 36..37: note = DNA
  misc_feature 38..50: note = RNA

SEQ ID NO: 199 - DNA, 50 bp, synthetic construct; identical to SEQ ID NO: 66
  source 1..50: mol_type = other DNA; note = Description of Artificial Sequence: Synthetic oligonucleotide; note = Description of Combined DNA/RNA Molecule: Synthetic oligonucleotide
  modified_base 1: mod_base = OTHER; note = 2'-O-methyluridine phosphorothioate
  modified_base 2: mod_base = OTHER; note = 2'-O-methyluridine phosphorothioate
  modified_base 3: mod_base = OTHER; note = 2'-O-methyluridine phosphorothioate
  modified_base 4: mod_base = OTHER; note = 2'-O-methylcytidine phosphorothioate
  modified_base 5: mod_base = OTHER; note = 2'-O-methyluridine
  modified_base 6: mod_base = OTHER; note = 2'-O-methyluridine
  modified_base 7: mod_base = OTHER; note = 2'-O-methylguanosine
  modified_base 8: mod_base = OTHER; note = 2'-O-methylguanosine
  modified_base 9: mod_base = OTHER; note = 2'-O-methylguanosine
  modified_base 10: mod_base = OTHER; note = 2'-O-methyladenosine
  modified_base 11: mod_base = OTHER; note = 2'-O-methyladenosine
  modified_base 12: mod_base = OTHER; note = 2'-O-methyluridine
  modified_base 13: mod_base = OTHER; note = 2'-O-methylguanosine
  modified_base 14: mod_base = OTHER; note = 2'-O-methylguanosine
  modified_base 15: mod_base = OTHER; note = 2'-O-methylcytidine
  modified_base 16: mod_base = OTHER; note = 2'-O-methylcytidine
  modified_base 17: mod_base = OTHER; note = 2'-O-methyluridine
  modified_base 18: mod_base = OTHER; note = 2'-O-methylguanosine
  modified_base 19: mod_base = OTHER; note = 2'-O-methyladenosine
  modified_base 20: mod_base = OTHER; note = 2'-O-methylguanosine
  modified_base 21: mod_base = OTHER; note = 2'-O-methylguanosine
  modified_base 22: mod_base = OTHER; note = 2'-O-methylguanosine
  modified_base 23: mod_base = OTHER; note = 2'-O-methyluridine
  modified_base 24: mod_base = OTHER; note = 2'-O-methylcytidine
  modified_base 25: mod_base = OTHER; note = 2'-O-methylguanosine
  modified_base 26: mod_base = OTHER; note = 2'-O-methylguanosine
  modified_base 27: mod_base = OTHER; note = 2'-O-methylcytidine
  modified_base 28: mod_base = OTHER; note = 2'-O-methylcytidine
  modified_base 29: mod_base = OTHER; note = 2'-O-methyluridine
  modified_base 30: mod_base = OTHER; note = 2'-O-methylcytidine
  modified_base 31: mod_base = OTHER; note = 2'-O-methyladenosine
  modified_base 32: mod_base = OTHER; note = 2'-O-methylguanosine
  modified_base 33: mod_base = OTHER; note = 2'-O-methylcytidine
  modified_base 34: mod_base = OTHER; note = 2'-O-methyluridine
  modified_base 35: mod_base = OTHER; note = 2'-O-methyluridine
  modified_base 36: mod_base = OTHER; note = Flexible thymidine
  modified_base 39: mod_base = OTHER; note = 2'-O-methyladenosine
  modified_base 40: mod_base = OTHER; note = 2'-O-methylcytidine
  modified_base 41: mod_base = OTHER; note = 2'-O-methyluridine
  modified_base 42: mod_base = OTHER; note = 2'-O-methyluridine
  modified_base 43: mod_base = OTHER; note = 2'-O-methylcytidine
  modified_base 44: mod_base = OTHER; note = 2'-O-methylcytidine
  modified_base 45: mod_base = OTHER; note = 2'-O-methyluridine
  modified_base 46: mod_base = OTHER; note = 2'-O-methylguanosine phosphorothioate
  modified_base 47: mod_base = OTHER; note = 2'-O-methylcytidine phosphorothioate
  modified_base 48: mod_base = OTHER; note = 2'-O-methylcytidine phosphorothioate
  modified_base 49: mod_base = OTHER; note = 2'-O-methylguanosine phosphorothioate
  modified_base 50: mod_base = OTHER; note = 2'-O-methylguanosine
  misc_feature 1..36: note = RNA
  misc_feature 37..38: note = DNA
  misc_feature 39..50: note = RNA

SEQ ID NO: 200 - DNA, 50 bp, synthetic construct; identical to SEQ ID NO: 66
  source 1..50: mol_type = other DNA; note = Description of Artificial Sequence: Synthetic oligonucleotide; note = Description of Combined DNA/RNA Molecule: Synthetic oligonucleotide
  modified_base 1: mod_base = OTHER; note = 2'-O-methyluridine phosphorothioate
  modified_base 2: mod_base = OTHER; note = 2'-O-methyluridine phosphorothioate
  modified_base 3: mod_base = OTHER; note = 2'-O-methyluridine phosphorothioate
  modified_base 4: mod_base = OTHER; note = 2'-O-methylcytidine phosphorothioate
  modified_base 5: mod_base = OTHER; note = 2'-O-methyluridine
  modified_base 6: mod_base = OTHER; note = 2'-O-methyluridine
  modified_base 7: mod_base = OTHER; note = 2'-O-methylguanosine
  modified_base 8: mod_base = OTHER; note = 2'-O-methylguanosine
  modified_base 9: mod_base = OTHER; note = 2'-O-methylguanosine
  modified_base 10: mod_base = OTHER; note = 2'-O-methyladenosine
  modified_base 11: mod_base = OTHER; note = 2'-O-methyladenosine
  modified_base 12: mod_base = OTHER; note = 2'-O-methyluridine
  modified_base 13: mod_base = OTHER; note = 2'-O-methylguanosine
  modified_base 14: mod_base = OTHER; note = 2'-O-methylguanosine
  modified_base 15: mod_base = OTHER; note = 2'-O-methylcytidine
  modified_base 16: mod_base = OTHER; note = 2'-O-methylcytidine
  modified_base 17: mod_base = OTHER; note = 2'-O-methyluridine
  modified_base 18: mod_base = OTHER; note = 2'-O-methylguanosine
  modified_base 19: mod_base = OTHER; note = 2'-O-methyladenosine
  modified_base 20: mod_base = OTHER; note = 2'-O-methylguanosine
  modified_base 21: mod_base = OTHER; note = 2'-O-methylguanosine
  modified_base 22: mod_base = OTHER; note = 2'-O-methylguanosine
  modified_base 23: mod_base = OTHER; note = 2'-O-methyluridine
  modified_base 24: mod_base = OTHER; note = 2'-O-methylcytidine
  modified_base 25: mod_base = OTHER; note = 2'-O-methylguanosine
  modified_base 26: mod_base = OTHER; note = 2'-O-methylguanosine
  modified_base 27: mod_base = OTHER; note = 2'-O-methylcytidine
  modified_base 28: mod_base = OTHER; note = 2'-O-methylcytidine
  modified_base 29: mod_base = OTHER; note = 2'-O-methyluridine
  modified_base 30: mod_base = OTHER; note = 2'-O-methylcytidine
  modified_base 31: mod_base = OTHER; note = 2'-O-methyladenosine
  modified_base 32: mod_base = OTHER; note = 2'-O-methylguanosine
  modified_base 33: mod_base = OTHER; note = 2'-O-methylcytidine
  modified_base 34: mod_base = OTHER; note = 2'-O-methyluridine
  modified_base 35: mod_base = OTHER; note = 2'-O-methyluridine
  modified_base 37: mod_base = OTHER; note = Flexible cytidine
  modified_base 39: mod_base = OTHER; note = 2'-O-methyladenosine
  modified_base 40: mod_base = OTHER; note = 2'-O-methylcytidine
  modified_base 41: mod_base = OTHER; note = 2'-O-methyluridine
  modified_base 42: mod_base = OTHER; note = 2'-O-methyluridine
  modified_base 43: mod_base = OTHER; note = 2'-O-methylcytidine
  modified_base 44: mod_base = OTHER; note = 2'-O-methylcytidine
  modified_base 45: mod_base = OTHER; note = 2'-O-methyluridine
  modified_base 46: mod_base = OTHER; note = 2'-O-methylguanosine phosphorothioate
  modified_base 47: mod_base = OTHER; note = 2'-O-methylcytidine phosphorothioate
  modified_base 48: mod_base = OTHER; note = 2'-O-methylcytidine phosphorothioate
  modified_base 49: mod_base = OTHER; note = 2'-O-methylguanosine phosphorothioate
  modified_base 50: mod_base = OTHER; note = 2'-O-methylguanosine
  misc_feature 1..35: note = RNA
  misc_feature 36: note = DNA
  misc_feature 37: note = RNA
  misc_feature 38: note = DNA
  misc_feature 39..50: note = RNA

SEQ ID NO: 201 - DNA, 50 bp, synthetic construct; identical to SEQ ID NO: 66
  source 1..50: mol_type = other DNA; note = Description of Artificial Sequence: Synthetic oligonucleotide; note = Description of Combined DNA/RNA Molecule: Synthetic oligonucleotide
  modified_base 1: mod_base = OTHER; note = 2'-O-methyluridine phosphorothioate
  modified_base 2: mod_base = OTHER; note = 2'-O-methyluridine phosphorothioate
  modified_base 3: mod_base = OTHER; note = 2'-O-methyluridine phosphorothioate
  modified_base 4: mod_base = OTHER; note = 2'-O-methylcytidine phosphorothioate
  modified_base 5: mod_base = OTHER; note = 2'-O-methyluridine
  modified_base 6: mod_base = OTHER; note = 2'-O-methyluridine
  modified_base 7: mod_base = OTHER; note = 2'-O-methylguanosine
  modified_base 8: mod_base = OTHER; note = 2'-O-methylguanosine
  modified_base 9: mod_base = OTHER; note = 2'-O-methylguanosine
  modified_base 10: mod_base = OTHER; note = 2'-O-methyladenosine
  modified_base 11: mod_base = OTHER; note = 2'-O-methyladenosine
  modified_base 12: mod_base = OTHER; note = 2'-O-methyluridine
  modified_base 13: mod_base = OTHER; note = 2'-O-methylguanosine
  modified_base 14: mod_base = OTHER; note = 2'-O-methylguanosine
  modified_base 15: mod_base = OTHER; note = 2'-O-methylcytidine
  modified_base 16: mod_base = OTHER; note = 2'-O-methylcytidine
  modified_base 17: mod_base = OTHER; note = 2'-O-methyluridine
  modified_base 18: mod_base = OTHER; note = 2'-O-methylguanosine
  modified_base 19: mod_base = OTHER; note = 2'-O-methyladenosine
  modified_base 20: mod_base = OTHER; note = 2'-O-methylguanosine
  modified_base 21: mod_base = OTHER; note = 2'-O-methylguanosine
  modified_base 22: mod_base = OTHER; note = 2'-O-methylguanosine
  modified_base 23: mod_base = OTHER; note = 2'-O-methyluridine
  modified_base 24: mod_base = OTHER; note = 2'-O-methylcytidine
  modified_base 25: mod_base = OTHER; note = 2'-O-methylguanosine
  modified_base 26: mod_base = OTHER; note = 2'-O-methylguanosine
  modified_base 27: mod_base = OTHER; note = 2'-O-methylcytidine
  modified_base 28: mod_base = OTHER; note = 2'-O-methylcytidine
  modified_base 29: mod_base = OTHER; note = 2'-O-methyluridine
  modified_base 30: mod_base = OTHER; note = 2'-O-methylcytidine
  modified_base 31: mod_base = OTHER; note = 2'-O-methyladenosine
  modified_base 32: mod_base = OTHER; note = 2'-O-methylguanosine
  modified_base 33: mod_base = OTHER; note = 2'-O-methylcytidine
  modified_base 34: mod_base = OTHER; note = 2'-O-methyluridine
  modified_base 35: mod_base = OTHER; note = 2'-O-methyluridine
  modified_base 38: mod_base = OTHER; note = Flexible cytidine
  modified_base 39: mod_base = OTHER; note = 2'-O-methyladenosine
  modified_base 40: mod_base = OTHER; note = 2'-O-methylcytidine
  modified_base 41: mod_base = OTHER; note = 2'-O-methyluridine
  modified_base 42: mod_base = OTHER; note = 2'-O-methyluridine
  modified_base 43: mod_base = OTHER; note = 2'-O-methylcytidine
  modified_base 44: mod_base = OTHER; note = 2'-O-methylcytidine
  modified_base 45: mod_base = OTHER; note = 2'-O-methyluridine
  modified_base 46: mod_base = OTHER; note = 2'-O-methylguanosine phosphorothioate
  modified_base 47: mod_base = OTHER; note = 2'-O-methylcytidine phosphorothioate
  modified_base 48: mod_base = OTHER; note = 2'-O-methylcytidine phosphorothioate
  modified_base 49: mod_base = OTHER; note = 2'-O-methylguanosine phosphorothioate
  modified_base 50: mod_base = OTHER; note = 2'-O-methylguanosine
  misc_feature 1..35: note = RNA
  misc_feature 36..37: note = DNA
  misc_feature 38..50: note = RNA

SEQ ID NO: 202 - DNA, 50 bp, synthetic construct; identical to SEQ ID NO: 66
  source 1..50: mol_type = other DNA; note = Description of Artificial Sequence: Synthetic oligonucleotide; note = Description of Combined DNA/RNA Molecule: Synthetic oligonucleotide
  modified_base 1: mod_base = OTHER; note = 2'-O-methyluridine phosphorothioate
  modified_base 2: mod_base = OTHER; note = 2'-O-methyluridine phosphorothioate
  modified_base 3: mod_base = OTHER; note = 2'-O-methyluridine phosphorothioate
  modified_base 4: mod_base = OTHER; note = 2'-O-methylcytidine phosphorothioate
  modified_base 5: mod_base = OTHER; note = 2'-O-methyluridine
  modified_base 6: mod_base = OTHER; note = 2'-O-methyluridine
  modified_base 7: mod_base = OTHER; note = 2'-O-methylguanosine
  modified_base 8: mod_base = OTHER; note = 2'-O-methylguanosine
  modified_base 9: mod_base = OTHER; note = 2'-O-methylguanosine
  modified_base 10: mod_base = OTHER; note = 2'-O-methyladenosine
  modified_base 11: mod_base = OTHER; note = 2'-O-methyladenosine
  modified_base 12: mod_base = OTHER; note = 2'-O-methyluridine
  modified_base 13: mod_base = OTHER; note = 2'-O-methylguanosine
  modified_base 14: mod_base = OTHER; note = 2'-O-methylguanosine
  modified_base 15: mod_base = OTHER; note = 2'-O-methylcytidine
  modified_base 16: mod_base = OTHER; note = 2'-O-methylcytidine
  modified_base 17: mod_base = OTHER; note = 2'-O-methyluridine
  modified_base 18: mod_base = OTHER; note = 2'-O-methylguanosine
  modified_base 19: mod_base = OTHER; note = 2'-O-methyladenosine
  modified_base 20: mod_base = OTHER; note = 2'-O-methylguanosine
  modified_base 21: mod_base = OTHER; note = 2'-O-methylguanosine
  modified_base 22: mod_base = OTHER; note = 2'-O-methylguanosine
  modified_base 23: mod_base = OTHER; note = 2'-O-methyluridine
  modified_base 24: mod_base = OTHER; note = 2'-O-methylcytidine
  modified_base 25: mod_base = OTHER; note = 2'-O-methylguanosine
  modified_base 26: mod_base = OTHER; note = 2'-O-methylguanosine
  modified_base 27: mod_base = OTHER; note = 2'-O-methylcytidine
  modified_base 28: mod_base = OTHER; note = 2'-O-methylcytidine
  modified_base 29: mod_base = OTHER; note = 2'-O-methyluridine
  modified_base 30: mod_base = OTHER; note = 2'-O-methylcytidine
  modified_base 31: mod_base = OTHER; note = 2'-O-methyladenosine
  modified_base 32: mod_base = OTHER; note = 2'-O-methylguanosine
  modified_base 33: mod_base = OTHER; note = 2'-O-methylcytidine
  modified_base 34: mod_base = OTHER; note = 2'-O-methyluridine
  modified_base 35: mod_base = OTHER; note = 2'-O-methyluridine
  modified_base 36: mod_base = OTHER; note = Beta-D-hexitol thymidine
  modified_base 39: mod_base = OTHER; note = 2'-O-methyladenosine
  modified_base 40: mod_base = OTHER; note = 2'-O-methylcytidine
  modified_base 41: mod_base = OTHER; note = 2'-O-methyluridine
  modified_base 42: mod_base = OTHER; note = 2'-O-methyluridine
  modified_base 43: mod_base = OTHER; note = 2'-O-methylcytidine
  modified_base 44: mod_base = OTHER; note = 2'-O-methylcytidine
  modified_base 45: mod_base = OTHER; note = 2'-O-methyluridine
  modified_base 46: mod_base = OTHER; note = 2'-O-methylguanosine phosphorothioate
  modified_base 47: mod_base = OTHER; note = 2'-O-methylcytidine phosphorothioate
  modified_base 48: mod_base = OTHER; note = 2'-O-methylcytidine phosphorothioate
  modified_base 49: mod_base = OTHER; note = 2'-O-methylguanosine phosphorothioate
  modified_base 50: mod_base = OTHER; note = 2'-O-methylguanosine
  misc_feature 1..36: note = RNA
  misc_feature 37..38: note = DNA
  misc_feature 39..50: note = RNA

SEQ ID NO: 203 - DNA, 50 bp, synthetic construct; identical to SEQ ID NO: 66
  source 1..50: mol_type = other DNA; note = Description of Artificial Sequence: Synthetic oligonucleotide; note = Description of Combined DNA/RNA Molecule: Synthetic oligonucleotide
  modified_base 1: mod_base = OTHER; note = 2'-O-methyluridine phosphorothioate
  modified_base 2: mod_base = OTHER; note = 2'-O-methyluridine phosphorothioate
  modified_base 3: mod_base = OTHER; note = 2'-O-methyluridine phosphorothioate
  modified_base 4: mod_base = OTHER; note = 2'-O-methylcytidine phosphorothioate
  modified_base 5: mod_base = OTHER; note = 2'-O-methyluridine
  modified_base 6: mod_base = OTHER; note = 2'-O-methyluridine
  modified_base 7: mod_base = OTHER; note = 2'-O-methylguanosine
  modified_base 8: mod_base = OTHER; note = 2'-O-methylguanosine
  modified_base 9: mod_base = OTHER; note = 2'-O-methylguanosine
  modified_base 10: mod_base = OTHER; note = 2'-O-methyladenosine
  modified_base 11: mod_base = OTHER; note = 2'-O-methyladenosine
  modified_base 12: mod_base = OTHER; note = 2'-O-methyluridine
  modified_base 13: mod_base = OTHER; note = 2'-O-methylguanosine
  modified_base 14: mod_base = OTHER; note = 2'-O-methylguanosine
  modified_base 15: mod_base = OTHER; note = 2'-O-methylcytidine
  modified_base 16: mod_base = OTHER; note = 2'-O-methylcytidine
  modified_base 17: mod_base = OTHER; note = 2'-O-methyluridine
  modified_base 18: mod_base = OTHER; note = 2'-O-methylguanosine
  modified_base 19: mod_base = OTHER; note = 2'-O-methyladenosine
  modified_base 20: mod_base = OTHER; note = 2'-O-methylguanosine
  modified_base 21: mod_base = OTHER; note = 2'-O-methylguanosine
  modified_base 22: mod_base = OTHER; note = 2'-O-methylguanosine
  modified_base 23: mod_base = OTHER; note = 2'-O-methyluridine
  modified_base 24: mod_base = OTHER; note = 2'-O-methylcytidine
  modified_base 25: mod_base = OTHER; note = 2'-O-methylguanosine
  modified_base 26: mod_base = OTHER; note = 2'-O-methylguanosine
  modified_base 27: mod_base = OTHER; note = 2'-O-methylcytidine
  modified_base 28: mod_base = OTHER; note = 2'-O-methylcytidine
  modified_base 29: mod_base = OTHER; note = 2'-O-methyluridine
  modified_base 30: mod_base = OTHER; note = 2'-O-methylcytidine
  modified_base 31: mod_base = OTHER; note = 2'-O-methyladenosine
  modified_base 32: mod_base = OTHER; note = 2'-O-methylguanosine
  modified_base 33: mod_base = OTHER; note = 2'-O-methylcytidine
  modified_base 34: mod_base = OTHER; note = 2'-O-methyluridine
  modified_base 35: mod_base = OTHER; note = 2'-O-methyluridine
  modified_base 37: mod_base = OTHER; note = Beta-D-hexitol cytidine
  modified_base 39: mod_base = OTHER; note = 2'-O-methyladenosine
  modified_base 40: mod_base = OTHER; note = 2'-O-methylcytidine
  modified_base 41: mod_base = OTHER; note = 2'-O-methyluridine
  modified_base 42: mod_base = OTHER; note = 2'-O-methyluridine
  modified_base 43: mod_base = OTHER; note = 2'-O-methylcytidine
  modified_base 44: mod_base = OTHER; note = 2'-O-methylcytidine
  modified_base 45: mod_base = OTHER; note = 2'-O-methyluridine
  modified_base 46: mod_base = OTHER; note = 2'-O-methylguanosine phosphorothioate
  modified_base 47: mod_base = OTHER; note = 2'-O-methylcytidine phosphorothioate
  modified_base 48: mod_base = OTHER; note = 2'-O-methylcytidine phosphorothioate
  modified_base 49: mod_base = OTHER; note = 2'-O-methylguanosine phosphorothioate
  modified_base 50: mod_base = OTHER; note = 2'-O-methylguanosine
  misc_feature 1..35: note = RNA
  misc_feature 36: note = DNA
  misc_feature 37: note = RNA
  misc_feature 38: note = DNA
  misc_feature 39..50: note = RNA

SEQ ID NO: 204 - DNA, 50 bp, synthetic construct; identical to SEQ ID NO: 66
  source 1..50: mol_type = other DNA; note = Description of Artificial Sequence: Synthetic oligonucleotide; note = Description of Combined DNA/RNA Molecule: Synthetic oligonucleotide
  modified_base 1: mod_base = OTHER; note = 2'-O-methyluridine phosphorothioate
  modified_base 2: mod_base = OTHER; note = 2'-O-methyluridine phosphorothioate
  modified_base 3: mod_base = OTHER; note = 2'-O-methyluridine phosphorothioate
  modified_base 4: mod_base = OTHER; note = 2'-O-methylcytidine phosphorothioate
  modified_base 5: mod_base = OTHER; note = 2'-O-methyluridine
  modified_base 6: mod_base = OTHER; note = 2'-O-methyluridine
  modified_base 7: mod_base = OTHER; note = 2'-O-methylguanosine
  modified_base 8: mod_base = OTHER; note = 2'-O-methylguanosine
  modified_base 9: mod_base = OTHER; note = 2'-O-methylguanosine
  modified_base 10: mod_base = OTHER; note = 2'-O-methyladenosine
  modified_base 11: mod_base = OTHER; note = 2'-O-methyladenosine
  modified_base 12: mod_base = OTHER; note = 2'-O-methyluridine
  modified_base 13: mod_base = OTHER; note = 2'-O-methylguanosine
  modified_base 14: mod_base = OTHER; note = 2'-O-methylguanosine
  modified_base 15: mod_base = OTHER; note = 2'-O-methylcytidine
  modified_base 16: mod_base = OTHER; note = 2'-O-methylcytidine
  modified_base 17: mod_base = OTHER; note = 2'-O-methyluridine
  modified_base 18: mod_base = OTHER; note = 2'-O-methylguanosine
  modified_base 19: mod_base = OTHER; note = 2'-O-methyladenosine
  modified_base 20: mod_base = OTHER; note = 2'-O-methylguanosine
  modified_base 21: mod_base = OTHER; note = 2'-O-methylguanosine
  modified_base 22: mod_base = OTHER; note = 2'-O-methylguanosine
  modified_base 23: mod_base = OTHER; note = 2'-O-methyluridine
  modified_base 24: mod_base = OTHER; note = 2'-O-methylcytidine
  modified_base 25: mod_base = OTHER; note = 2'-O-methylguanosine
  modified_base 26: mod_base = OTHER; note = 2'-O-methylguanosine
  modified_base 27: mod_base = OTHER; note = 2'-O-methylcytidine
  modified_base 28: mod_base = OTHER; note = 2'-O-methylcytidine
  modified_base 29: mod_base = OTHER; note = 2'-O-methyluridine
  modified_base 30: mod_base = OTHER; note = 2'-O-methylcytidine
  modified_base 31: mod_base = OTHER; note = 2'-O-methyladenosine
  modified_base 32: mod_base = OTHER; note = 2'-O-methylguanosine
  modified_base 33: mod_base = OTHER; note = 2'-O-methylcytidine
  modified_base 34: mod_base = OTHER; note = 2'-O-methyluridine
  modified_base 35: mod_base = OTHER; note = 2'-O-methyluridine
  modified_base 38: mod_base = OTHER; note = Beta-D-hexitol cytidine
  modified_base 39: mod_base = OTHER; note = 2'-O-methyladenosine
  modified_base 40: mod_base = OTHER; note = 2'-O-methylcytidine
  modified_base 41: mod_base = OTHER; note = 2'-O-methyluridine
  modified_base 42: mod_base = OTHER; note = 2'-O-methyluridine
  modified_base 43: mod_base = OTHER; note = 2'-O-methylcytidine
  modified_base 44: mod_base = OTHER; note = 2'-O-methylcytidine
  modified_base 45: mod_base = OTHER; note = 2'-O-methyluridine
  modified_base 46: mod_base = OTHER; note = 2'-O-methylguanosine phosphorothioate
  modified_base 47: mod_base = OTHER; note = 2'-O-methylcytidine phosphorothioate
  modified_base 48: mod_base = OTHER; note = 2'-O-methylcytidine phosphorothioate
  modified_base 49: mod_base = OTHER; note = 2'-O-methylguanosine phosphorothioate
  modified_base 50: mod_base = OTHER; note = 2'-O-methylguanosine
  misc_feature 1..35: note = RNA
  misc_feature 36..37: note = DNA
  misc_feature 38..50: note = RNA

SEQ ID NO: 205 - DNA, 50 bp, synthetic construct
  source 1..50: mol_type = other DNA; note = Description of Artificial Sequence: Synthetic oligonucleotide; note = Description of Combined DNA/RNA Molecule: Synthetic oligonucleotide
  modified_base 1: mod_base = OTHER; note = 2'-O-methyluridine phosphorothioate
  modified_base 2: mod_base = OTHER; note = 2'-O-methyluridine phosphorothioate
  modified_base 3: mod_base = OTHER; note = 2'-O-methyluridine phosphorothioate
  modified_base 4: mod_base = OTHER; note = 2'-O-methylcytidine phosphorothioate
  modified_base 5: mod_base = OTHER; note = 2'-O-methyluridine
  modified_base 6: mod_base = OTHER; note = 2'-O-methyluridine
  modified_base 7: mod_base = OTHER; note = 2'-O-methylguanosine
  modified_base 8: mod_base = OTHER; note = 2'-O-methylguanosine
  modified_base 9: mod_base = OTHER; note = 2'-O-methylguanosine
  modified_base 10: mod_base = OTHER; note = 2'-O-methyladenosine
  modified_base 11: mod_base = OTHER; note = 2'-O-methyladenosine
  modified_base 12: mod_base = OTHER; note = 2'-O-methyluridine
  modified_base 13: mod_base = OTHER; note = 2'-O-methylguanosine
  modified_base 14: mod_base = OTHER; note = 2'-O-methylguanosine
  modified_base 15: mod_base = OTHER; note = 2'-O-methylcytidine
  modified_base 16: mod_base = OTHER; note = 2'-O-methylcytidine
  modified_base 17: mod_base = OTHER; note = 2'-O-methyluridine
  modified_base 18: mod_base = OTHER; note = 2'-O-methylguanosine
  modified_base 19: mod_base = OTHER; note = 2'-O-methyladenosine
  modified_base 20: mod_base = OTHER; note = 2'-O-methylguanosine
  modified_base 21: mod_base = OTHER; note = 2'-O-methylguanosine
  modified_base 22: mod_base = OTHER; note = 2'-O-methylguanosine
  modified_base 23: mod_base = OTHER; note = 2'-O-methyluridine
  modified_base 24: mod_base = OTHER; note = 2'-O-methylcytidine
  modified_base 25: mod_base = OTHER; note = 2'-O-methylguanosine
  modified_base 26: mod_base = OTHER; note = 2'-O-methylguanosine
  modified_base 27: mod_base = OTHER; note = 2'-O-methylcytidine
  modified_base 28: mod_base = OTHER; note = 2'-O-methylcytidine
  modified_base 29: mod_base = OTHER; note = 2'-O-methyluridine
  modified_base 30: mod_base = OTHER; note = 2'-O-methylcytidine
  modified_base 31: mod_base = OTHER; note = 2'-O-methyladenosine
  modified_base 32: mod_base = OTHER; note = 2'-O-methylguanosine
  modified_base 33: mod_base = OTHER; note = 2'-O-methylcytidine
  modified_base 34: mod_base = OTHER; note = 2'-O-methyluridine
  modified_base 35: mod_base = OTHER; note = 2'-O-methyluridine
  modified_base 36: mod_base = OTHER; note = Inosine
  modified_base 39: mod_base = OTHER; note = 2'-O-methyladenosine
  modified_base 40: mod_base = OTHER; note = 2'-O-methylcytidine
  modified_base 41: mod_base = OTHER; note = 2'-O-methyluridine
  modified_base 42: mod_base = OTHER; note = 2'-O-methyluridine
  modified_base 43: mod_base = OTHER; note = 2'-O-methylcytidine
  modified_base 44: mod_base = OTHER; note = 2'-O-methylcytidine
  modified_base 45: mod_base = OTHER; note = 2'-O-methyluridine
  modified_base 46: mod_base = OTHER; note = 2'-O-methylguanosine phosphorothioate
  modified_base 47: mod_base = OTHER; note = 2'-O-methylcytidine phosphorothioate
  modified_base 48: mod_base = OTHER; note = 2'-O-methylcytidine phosphorothioate
  modified_base 49: mod_base = OTHER; note = 2'-O-methylguanosine phosphorothioate
  modified_base 50: mod_base = OTHER; note = 2'-O-methylguanosine
  misc_feature 1..35: note = RNA
  misc_feature 36..38: note = DNA
  misc_feature 39..50: note = RNA
tttcttgggaatggcctgagggtcggcctcagcttnccacttcctgccgg

SEQ ID NO: 206 - DNA, 50 bp, synthetic construct; identical to SEQ ID NO: 187
  source 1..50: mol_type = other DNA; note = Description of Artificial Sequence: Synthetic oligonucleotide; note = Description of Combined DNA/RNA Molecule: Synthetic oligonucleotide
  modified_base 1: mod_base = OTHER; note = 2'-O-methyluridine phosphorothioate
  modified_base 2: mod_base = OTHER; note = 2'-O-methyluridine phosphorothioate
  modified_base 3: mod_base = OTHER; note = 2'-O-methyluridine phosphorothioate
  modified_base 4: mod_base = OTHER; note = 2'-O-methylcytidine phosphorothioate
  modified_base 5: mod_base = OTHER; note = 2'-O-methyluridine
  modified_base 6: mod_base = OTHER; note = 2'-O-methyluridine
  modified_base 7: mod_base = OTHER; note = 2'-O-methylguanosine
  modified_base 8: mod_base = OTHER; note = 2'-O-methylguanosine
  modified_base 9: mod_base = OTHER; note = 2'-O-methylguanosine
  modified_base 10: mod_base = OTHER; note = 2'-O-methyladenosine
  modified_base 11: mod_base = OTHER; note = 2'-O-methyladenosine
  modified_base 12: mod_base = OTHER; note = 2'-O-methyluridine
  modified_base 13: mod_base = OTHER; note = 2'-O-methylguanosine
  modified_base 14: mod_base = OTHER; note = 2'-O-methylguanosine
  modified_base 15: mod_base = OTHER; note = 2'-O-methylcytidine
  modified_base 16: mod_base = OTHER; note = 2'-O-methylcytidine
  modified_base 17: mod_base = OTHER; note = 2'-O-methyluridine
  modified_base 18: mod_base = OTHER; note = 2'-O-methylguanosine
  modified_base 19: mod_base = OTHER; note = 2'-O-methyladenosine
  modified_base 20: mod_base = OTHER; note = 2'-O-methylguanosine
  modified_base 21: mod_base = OTHER; note = 2'-O-methylguanosine
  modified_base 22: mod_base = OTHER; note = 2'-O-methylguanosine
  modified_base 23: mod_base = OTHER; note = 2'-O-methyluridine
  modified_base 24: mod_base = OTHER; note = 2'-O-methylcytidine
  modified_base 25: mod_base = OTHER; note = 2'-O-methylguanosine
  modified_base 26: mod_base = OTHER; note = 2'-O-methylguanosine
  modified_base 27: mod_base = OTHER; note = 2'-O-methylcytidine
  modified_base 28: mod_base = OTHER; note = 2'-O-methylcytidine
  modified_base 29: mod_base = OTHER; note = 2'-O-methyluridine
  modified_base 30: mod_base = OTHER; note = 2'-O-methylcytidine
  modified_base 31: mod_base = OTHER; note = 2'-O-methyladenosine
  modified_base 32: mod_base = OTHER; note = 2'-O-methylguanosine
  modified_base 33: mod_base = OTHER; note = 2'-O-methylcytidine
  modified_base 34: mod_base = OTHER; note = 2'-O-methyluridine
  modified_base 35: mod_base = OTHER; note = 2'-O-methyluridine
  modified_base 37: mod_base = OTHER; note = Inosine
  modified_base 39: mod_base = OTHER; note = 2'-O-methyladenosine
  modified_base 40: mod_base = OTHER; note = 2'-O-methylcytidine
  modified_base 41: mod_base = OTHER; note = 2'-O-methyluridine
  modified_base 42: mod_base = OTHER; note = 2'-O-methyluridine
  modified_base 43: mod_base = OTHER; note = 2'-O-methylcytidine
  modified_base 44: mod_base = OTHER; note = 2'-O-methylcytidine
  modified_base 45: mod_base = OTHER; note = 2'-O-methyluridine
  modified_base 46: mod_base = OTHER; note = 2'-O-methylguanosine phosphorothioate
  modified_base 47: mod_base = OTHER; note = 2'-O-methylcytidine phosphorothioate
  modified_base 48: mod_base = OTHER; note = 2'-O-methylcytidine phosphorothioate
  modified_base 49: mod_base = OTHER; note = 2'-O-methylguanosine phosphorothioate
  modified_base 50: mod_base = OTHER; note = 2'-O-methylguanosine
  misc_feature 1..35: note = RNA
  misc_feature 36..38: note = DNA
  misc_feature 39..50: note = RNA

SEQ ID NO: 207 - DNA, 50 bp, synthetic construct
  source 1..50: mol_type = other DNA; note = Description of Artificial Sequence: Synthetic oligonucleotide; note = Description of Combined DNA/RNA Molecule: Synthetic oligonucleotide
  modified_base 1: mod_base = OTHER; note = 2'-O-methyluridine phosphorothioate
  modified_base 2: mod_base = OTHER; note = 2'-O-methyluridine phosphorothioate
  modified_base 3: mod_base = OTHER; note = 2'-O-methyluridine phosphorothioate
  modified_base 4: mod_base = OTHER; note = 2'-O-methylcytidine phosphorothioate
  modified_base 5: mod_base = OTHER; note = 2'-O-methyluridine
  modified_base 6: mod_base = OTHER; note = 2'-O-methyluridine
  modified_base 7: mod_base = OTHER; note = 2'-O-methylguanosine
  modified_base 8: mod_base = OTHER; note = 2'-O-methylguanosine
  modified_base 9: mod_base = OTHER; note = 2'-O-methylguanosine
  modified_base 10: mod_base = OTHER; note = 2'-O-methyladenosine
  modified_base 11: mod_base = OTHER; note = 2'-O-methyladenosine
  modified_base 12: mod_base = OTHER; note = 2'-O-methyluridine
  modified_base 13: mod_base = OTHER; note = 2'-O-methylguanosine
  modified_base 14: mod_base = OTHER; note = 2'-O-methylguanosine
  modified_base 15: mod_base = OTHER; note = 2'-O-methylcytidine
  modified_base 16: mod_base = OTHER; note = 2'-O-methylcytidine
  modified_base 17: mod_base = OTHER; note = 2'-O-methyluridine
  modified_base 18: mod_base = OTHER; note = 2'-O-methylguanosine
  modified_base 19: mod_base = OTHER; note = 2'-O-methyladenosine
  modified_base 20: mod_base = OTHER; note = 2'-O-methylguanosine
  modified_base 21: mod_base = OTHER; note = 2'-O-methylguanosine
  modified_base 22: mod_base = OTHER; note = 2'-O-methylguanosine
  modified_base 23: mod_base = OTHER; note = 2'-O-methyluridine
  modified_base 24: mod_base = OTHER; note = 2'-O-methylcytidine
  modified_base 25: mod_base = OTHER; note = 2'-O-methylguanosine
  modified_base 26: mod_base = OTHER; note = 2'-O-methylguanosine
  modified_base 27: mod_base = OTHER; note = 2'-O-methylcytidine
  modified_base 28: mod_base = OTHER; note = 2'-O-methylcytidine
  modified_base 29: mod_base = OTHER; note = 2'-O-methyluridine
  modified_base 30: mod_base = OTHER; note = 2'-O-methylcytidine
  modified_base 31: mod_base = OTHER; note = 2'-O-methyladenosine
  modified_base 32: mod_base = OTHER; note = 2'-O-methylguanosine
  modified_base 33: mod_base = OTHER; note = 2'-O-methylcytidine
  modified_base 34: mod_base = OTHER; note = 2'-O-methyluridine
  modified_base 35: mod_base = OTHER; note = 2'-O-methyluridine
  modified_base 38: mod_base = OTHER; note = Inosine
  modified_base 39: mod_base = OTHER; note = 2'-O-methyladenosine
  modified_base 40: mod_base = OTHER; note = 2'-O-methylcytidine
  modified_base 41: mod_base = OTHER; note = 2'-O-methyluridine
  modified_base 42: mod_base = OTHER; note = 2'-O-methyluridine
  modified_base 43: mod_base = OTHER; note = 2'-O-methylcytidine
  modified_base 44: mod_base = OTHER; note = 2'-O-methylcytidine
  modified_base 45: mod_base = OTHER; note = 2'-O-methyluridine
  modified_base 46: mod_base = OTHER; note = 2'-O-methylguanosine phosphorothioate
  modified_base 47: mod_base = OTHER; note = 2'-O-methylcytidine phosphorothioate
  modified_base 48: mod_base = OTHER; note = 2'-O-methylcytidine phosphorothioate
  modified_base 49: mod_base = OTHER; note = 2'-O-methylguanosine phosphorothioate
  modified_base 50: mod_base = OTHER; note = 2'-O-methylguanosine
  misc_feature 1..35: note = RNA
  misc_feature 36..38: note = DNA
  misc_feature 39..50: note = RNA
tttcttgggaatggcctgagggtcggcctcagctttcnacttcctgccgg

SEQ ID NO: 208 - DNA, 50 bp, synthetic construct
  source 1..50: mol_type = other DNA; note = Description of Artificial Sequence: Synthetic oligonucleotide; note = Description of Combined DNA/RNA Molecule: Synthetic oligonucleotide
  modified_base 1: mod_base = OTHER; note = 2'-O-methyluridine phosphorothioate
  modified_base 2: mod_base = OTHER; note = 2'-O-methyluridine phosphorothioate
  modified_base 3: mod_base = OTHER; note = 2'-O-methyluridine phosphorothioate
  modified_base 4: mod_base = OTHER; note = 2'-O-methylcytidine phosphorothioate
  modified_base 5: mod_base = OTHER; note = 2'-O-methyluridine
  modified_base 6: mod_base = OTHER; note = 2'-O-methyluridine
  modified_base 7: mod_base = OTHER; note = 2'-O-methylguanosine
  modified_base 8: mod_base = OTHER; note = 2'-O-methylguanosine
  modified_base 9: mod_base = OTHER; note = 2'-O-methylguanosine
  modified_base 10: mod_base = OTHER; note = 2'-O-methyladenosine
  modified_base 11: mod_base = OTHER; note = 2'-O-methyladenosine
  modified_base 12: mod_base = OTHER; note = 2'-O-methyluridine
  modified_base 13: mod_base = OTHER; note = 2'-O-methylguanosine
  modified_base 14: mod_base = OTHER; note = 2'-O-methylguanosine
  modified_base 15: mod_base = OTHER; note = 2'-O-methylcytidine
  modified_base 16: mod_base = OTHER; note = 2'-O-methylcytidine
  modified_base 17: mod_base = OTHER; note = 2'-O-methyluridine
  modified_base 18: mod_base = OTHER; note = 2'-O-methylguanosine
  modified_base 19: mod_base = OTHER; note = 2'-O-methyladenosine
  modified_base 20: mod_base = OTHER; note = 2'-O-methylguanosine
  modified_base 21: mod_base = OTHER; note = 2'-O-methylguanosine
  modified_base 22: mod_base = OTHER; note = 2'-O-methylguanosine
  modified_base 23: mod_base = OTHER; note = 2'-O-methyluridine
  modified_base 24: mod_base = OTHER; note = 2'-O-methylcytidine
  modified_base 25: mod_base = OTHER; note = 2'-O-methylguanosine
  modified_base 26: mod_base = OTHER; note = 2'-O-methylguanosine
  modified_base 27: mod_base = OTHER; note = 2'-O-methylcytidine
  modified_base 28: mod_base = OTHER; note = 2'-O-methylcytidine
  modified_base 29: mod_base = OTHER; note = 2'-O-methyluridine
  modified_base 30: mod_base = OTHER; note = 2'-O-methylcytidine
  modified_base 31: mod_base = OTHER; note = 2'-O-methyladenosine
  modified_base 32: mod_base = OTHER; note = 2'-O-methylguanosine
  modified_base 33: mod_base = OTHER; note = 2'-O-methylcytidine
  modified_base 34: mod_base = OTHER; note = 2'-O-methyluridine
  modified_base 35: mod_base = OTHER; note = 2'-O-methyluridine
  modified_base 36: mod_base = OTHER; note = Inosine
  modified_base 37: mod_base = OTHER; note = Inosine
  modified_base 39: mod_base = OTHER; note = 2'-O-methyladenosine
  modified_base 40: mod_base = OTHER; note = 2'-O-methylcytidine
  modified_base 41: mod_base = OTHER; note = 2'-O-methyluridine
  modified_base 42: mod_base = OTHER; note = 2'-O-methyluridine
  modified_base 43: mod_base = OTHER; note = 2'-O-methylcytidine
  modified_base 44: mod_base = OTHER; note = 2'-O-methylcytidine
  modified_base 45: mod_base = OTHER; note = 2'-O-methyluridine
  modified_base 46: mod_base = OTHER; note = 2'-O-methylguanosine phosphorothioate
  modified_base 47: mod_base = OTHER; note = 2'-O-methylcytidine phosphorothioate
  modified_base 48: mod_base = OTHER; note = 2'-O-methylcytidine phosphorothioate
  modified_base 49: mod_base = OTHER; note = 2'-O-methylguanosine phosphorothioate
  modified_base 50: mod_base = OTHER; note = 2'-O-methylguanosine
  misc_feature 1..35: note = RNA
  misc_feature 36..38: note = DNA
  misc_feature 39..50: note = RNA
tttcttgggaatggcctgagggtcggcctcagcttnncacttcctgccgg

SEQ ID NO: 209 - DNA, 50 bp, synthetic construct
  source 1..50: mol_type = other DNA; note = Description of Artificial Sequence: Synthetic oligonucleotide; note = Description of Combined DNA/RNA Molecule: Synthetic oligonucleotide
  modified_base 1: mod_base = OTHER; note = 2'-O-methyluridine phosphorothioate
  modified_base 2: mod_base = OTHER; note = 2'-O-methyluridine phosphorothioate
  modified_base 3: mod_base = OTHER; note = 2'-O-methyluridine phosphorothioate
  modified_base 4: mod_base = OTHER; note = 2'-O-methylcytidine phosphorothioate
  modified_base 5: mod_base = OTHER; note = 2'-O-methyluridine
  modified_base 6: mod_base = OTHER; note = 2'-O-methyluridine
  modified_base 7: mod_base = OTHER; note = 2'-O-methylguanosine
  modified_base 8: mod_base = OTHER; note = 2'-O-methylguanosine
  modified_base 9: mod_base = OTHER; note = 2'-O-methylguanosine
  modified_base 10: mod_base = OTHER; note = 2'-O-methyladenosine
  modified_base 11: mod_base = OTHER; note = 2'-O-methyladenosine
  modified_base 12: mod_base = OTHER; note = 2'-O-methyluridine
  modified_base 13: mod_base = OTHER; note = 2'-O-methylguanosine
  modified_base 14: mod_base = OTHER; note = 2'-O-methylguanosine
  modified_base 15: mod_base = OTHER; note = 2'-O-methylcytidine
  modified_base 16: mod_base = OTHER; note = 2'-O-methylcytidine
  modified_base 17: mod_base = OTHER; note = 2'-O-methyluridine
  modified_base 18: mod_base = OTHER; note = 2'-O-methylguanosine
  modified_base 19: mod_base = OTHER; note = 2'-O-methyladenosine
  modified_base 20: mod_base = OTHER; note = 2'-O-methylguanosine
  modified_base 21: mod_base = OTHER; note = 2'-O-methylguanosine
  modified_base 22: mod_base = OTHER; note = 2'-O-methylguanosine
  modified_base 23: mod_base = OTHER; note = 2'-O-methyluridine
  modified_base 24: mod_base = OTHER; note = 2'-O-methylcytidine
  modified_base 25: mod_base = OTHER; note = 2'-O-methylguanosine
  modified_base 26: mod_base = OTHER; note = 2'-O-methylguanosine
  modified_base 27: mod_base = OTHER; note = 2'-O-methylcytidine
  modified_base 28: mod_base = OTHER; note = 2'-O-methylcytidine
  modified_base 29: mod_base = OTHER; note = 2'-O-methyluridine
  modified_base 30: mod_base = OTHER; note = 2'-O-methylcytidine
  modified_base 31: mod_base = OTHER; note = 2'-O-methyladenosine
  modified_base 32: mod_base = OTHER; note = 2'-O-methylguanosine
  modified_base 33: mod_base = OTHER; note = 2'-O-methylcytidine
  modified_base 34: mod_base = OTHER; note = 2'-O-methyluridine
  modified_base 35: mod_base = OTHER; note = 2'-O-methyluridine
  modified_base 37: mod_base = OTHER; note = Inosine
  modified_base 38: mod_base = OTHER; note = Inosine
  modified_base 39: mod_base = OTHER; note = 2'-O-methyladenosine
  modified_base 40: mod_base = OTHER; note = 2'-O-methylcytidine
  modified_base 41: mod_base = OTHER; note = 2'-O-methyluridine
  modified_base 42: mod_base = OTHER; note = 2'-O-methyluridine
  modified_base 43: mod_base = OTHER; note = 2'-O-methylcytidine
  modified_base 44: mod_base = OTHER; note = 2'-O-methylcytidine
  modified_base 45: mod_base = OTHER; note = 2'-O-methyluridine
  modified_base 46: mod_base = OTHER; note = 2'-O-methylguanosine phosphorothioate
  modified_base 47: mod_base = OTHER; note = 2'-O-methylcytidine phosphorothioate
  modified_base 48: mod_base = OTHER; note = 2'-O-methylcytidine phosphorothioate
  modified_base 49: mod_base = OTHER; note = 2'-O-methylguanosine phosphorothioate
  modified_base 50: mod_base = OTHER; note = 2'-O-methylguanosine
  misc_feature 1..35: note = RNA
  misc_feature 36..38: note = DNA
  misc_feature 39..50: note = RNA
tttcttgggaatggcctgagggtcggcctcagctttnnacttcctgccgg

SEQ ID NO: 210 - DNA, 50 bp, synthetic construct
  source 1..50: mol_type = other DNA; note = Description of Artificial Sequence: Synthetic oligonucleotide; note = Description of Combined DNA/RNA Molecule: Synthetic oligonucleotide
  modified_base 1: mod_base = OTHER; note = 2'-O-methyluridine phosphorothioate
  modified_base 2: mod_base = OTHER; note = 2'-O-methyluridine phosphorothioate
  modified_base 3: mod_base = OTHER; note = 2'-O-methyluridine phosphorothioate
  modified_base 4: mod_base = OTHER; note = 2'-O-methylcytidine phosphorothioate
  modified_base 5: mod_base = OTHER; note = 2'-O-methyluridine
  modified_base 6: mod_base = OTHER; note = 2'-O-methyluridine
  modified_base 7: mod_base = OTHER; note = 2'-O-methylguanosine
  modified_base 8: mod_base = OTHER; note = 2'-O-methylguanosine
  modified_base 9: mod_base = OTHER; note = 2'-O-methylguanosine
  modified_base 10: mod_base = OTHER; note = 2'-O-methyladenosine
  modified_base 11: mod_base = OTHER; note = 2'-O-methyladenosine
  modified_base 12: mod_base = OTHER; note = 2'-O-methyluridine
  modified_base 13: mod_base = OTHER; note = 2'-O-methylguanosine
  modified_base 14: mod_base = OTHER; note = 2'-O-methylguanosine
  modified_base 15: mod_base = OTHER; note = 2'-O-methylcytidine
  modified_base 16: mod_base = OTHER; note = 2'-O-methylcytidine
  modified_base 17: mod_base = OTHER; note = 2'-O-methyluridine
  modified_base 18: mod_base = OTHER; note = 2'-O-methylguanosine
  modified_base 19: mod_base = OTHER; note = 2'-O-methyladenosine
  modified_base 20: mod_base = OTHER; note = 2'-O-methylguanosine
  modified_base 21: mod_base = OTHER; note = 2'-O-methylguanosine
  modified_base 22: mod_base = OTHER; note = 2'-O-methylguanosine
  modified_base 23: mod_base = OTHER; note = 2'-O-methyluridine
  modified_base 24: mod_base = OTHER; note = 2'-O-methylcytidine
  modified_base 25: mod_base = OTHER; note = 2'-O-methylguanosine
  modified_base 26: mod_base = OTHER; note = 2'-O-methylguanosine
  modified_base 27: mod_base = OTHER; note = 2'-O-methylcytidine
  modified_base 28: mod_base = OTHER; note = 2'-O-methylcytidine
  modified_base 29: mod_base = OTHER; note = 2'-O-methyluridine
  modified_base 30: mod_base = OTHER; note = 2'-O-methylcytidine
  modified_base 31: mod_base = OTHER; note = 2'-O-methyladenosine
  modified_base 32: mod_base = OTHER; note = 2'-O-methylguanosine
  modified_base 33: mod_base = OTHER; note = 2'-O-methylcytidine
  modified_base 34: mod_base = OTHER; note = 2'-O-methyluridine
  modified_base 35: mod_base = OTHER; note = 2'-O-methyluridine
  modified_base 36: mod_base = OTHER; note = Inosine
  modified_base 38: mod_base = OTHER; note = Inosine
  modified_base 39: mod_base = OTHER; note = 2'-O-methyladenosine
  modified_base 40: mod_base = OTHER; note = 2'-O-methylcytidine
  modified_base 41: mod_base = OTHER; note = 2'-O-methyluridine
  modified_base 42: mod_base = OTHER; note = 2'-O-methyluridine
  modified_base 43: mod_base = OTHER; note = 2'-O-methylcytidine
  modified_base 44: mod_base = OTHER; note = 2'-O-methylcytidine
  modified_base 45: mod_base = OTHER; note = 2'-O-methyluridine
  modified_base 46: mod_base = OTHER; note = 2'-O-methylguanosine phosphorothioate
  modified_base 47: mod_base = OTHER; note = 2'-O-methylcytidine phosphorothioate
  modified_base 48: mod_base = OTHER; note = 2'-O-methylcytidine phosphorothioate
  modified_base 49: mod_base = OTHER; note = 2'-O-methylguanosine phosphorothioate
  modified_base 50: mod_base = OTHER; note = 2'-O-methylguanosine
  misc_feature 1..35: note = RNA
  misc_feature 36..38: note = DNA
  misc_feature 39..50: note = RNA
tttcttgggaatggcctgagggtcggcctcagcttncnacttcctgccgg

SEQ ID NO: 211 - DNA, 50 bp, synthetic construct
  source 1..50: mol_type = other DNA; note = Description of Artificial Sequence: Synthetic oligonucleotide; note = Description of Combined DNA/RNA Molecule: Synthetic oligonucleotide
  modified_base 1: mod_base = OTHER; note = 2'-O-methyluridine phosphorothioate
  modified_base 2: mod_base = OTHER; note = 2'-O-methyluridine phosphorothioate
  modified_base 3: mod_base = OTHER; note = 2'-O-methyluridine phosphorothioate
  modified_base 4: mod_base = OTHER; note = 2'-O-methylcytidine phosphorothioate
  modified_base 5: mod_base = OTHER; note = 2'-O-methyluridine
  modified_base 6: mod_base = OTHER; note = 2'-O-methyluridine
  modified_base 7: mod_base = OTHER; note = 2'-O-methylguanosine
  modified_base 8: mod_base = OTHER; note = 2'-O-methylguanosine
  modified_base 9: mod_base = OTHER; note = 2'-O-methylguanosine
  modified_base 10: mod_base = OTHER; note = 2'-O-methyladenosine
  modified_base 11: mod_base = OTHER; note = 2'-O-methyladenosine
  modified_base 12: mod_base = OTHER; note = 2'-O-methyluridine
  modified_base 13: mod_base = OTHER; note = 2'-O-methylguanosine
  modified_base 14: mod_base = OTHER; note = 2'-O-methylguanosine
  modified_base 15: mod_base = OTHER; note = 2'-O-methylcytidine
  modified_base 16: mod_base = OTHER; note = 2'-O-methylcytidine
  modified_base 17: mod_base = OTHER; note = 2'-O-methyluridine
  modified_base 18: mod_base = OTHER; note = 2'-O-methylguanosine
  modified_base 19: mod_base = OTHER; note = 2'-O-methyladenosine
  modified_base 20: mod_base = OTHER; note = 2'-O-methylguanosine
  modified_base 21: mod_base = OTHER; note = 2'-O-methylguanosine
  modified_base 22: mod_base = OTHER; note = 2'-O-methylguanosine
  modified_base 23: mod_base = OTHER; note = 2'-O-methyluridine
  modified_base 24: mod_base = OTHER; note = 2'-O-methylcytidine
  modified_base 25: mod_base = OTHER; note = 2'-O-methylguanosine
  modified_base 26: mod_base = OTHER; note = 2'-O-methylguanosine
  modified_base 27: mod_base = OTHER; note = 2'-O-methylcytidine
  modified_base 28: mod_base = OTHER; note = 2'-O-methylcytidine
  modified_base 29: mod_base = OTHER; note = 2'-O-methyluridine
  modified_base 30: mod_base = OTHER; note = 2'-O-methylcytidine
  modified_base 31: mod_base = OTHER; note = 2'-O-methyladenosine
  modified_base 32: mod_base = OTHER; note = 2'-O-methylguanosine
  modified_base 33: mod_base = OTHER; note = 2'-O-methylcytidine
  modified_base 34: mod_base = OTHER; note = 2'-O-methyluridine
  modified_base 35: mod_base = OTHER; note = 2'-O-methyluridine
  modified_base 36: mod_base = OTHER; note = Inosine
  modified_base 37: mod_base = OTHER; note = Inosine
  modified_base 38: mod_base = OTHER; note = Inosine
  modified_base 39: mod_base = OTHER; note = 2'-O-methyladenosine
  modified_base 40: mod_base = OTHER; note = 2'-O-methylcytidine
  modified_base 41: mod_base = OTHER; note = 2'-O-methyluridine
  modified_base 42: mod_base = OTHER; note = 2'-O-methyluridine
  modified_base 43: mod_base = OTHER; note = 2'-O-methylcytidine
  modified_base 44: mod_base = OTHER; note = 2'-O-methylcytidine
  modified_base 45: mod_base = OTHER; note = 2'-O-methyluridine
  modified_base 46: mod_base = OTHER; note = 2'-O-methylguanosine phosphorothioate
  modified_base 47: mod_base = OTHER; note = 2'-O-methylcytidine phosphorothioate
  modified_base 48: mod_base = OTHER; note = 2'-O-methylcytidine phosphorothioate
  modified_base 49: mod_base = OTHER; note = 2'-O-methylguanosine phosphorothioate
  modified_base 50: mod_base = OTHER; note = 2'-O-methylguanosine
  misc_feature 1..35: note = RNA
  misc_feature 36..38: note = DNA
  misc_feature 39..50: note = RNA
tttcttgggaatggcctgagggtcggcctcagcttnnnacttcctgccgg

SEQ ID NO: 212 - DNA, 63 bp, synthetic construct; identical to SEQ ID NO: 62
  source 1..63: mol_type = other DNA; note = Description of Artificial Sequence: Synthetic oligonucleotide; note = Description of Combined DNA/RNA Molecule: Synthetic oligonucleotide
  modified_base 1: mod_base = OTHER; note = 2'-O-methylguanosine phosphorothioate
  modified_base 2: mod_base = OTHER; note = 2'-O-methyluridine phosphorothioate
  modified_base 3: mod_base = OTHER; note = 2'-O-methylguanosine phosphorothioate
  modified_base 4: mod_base = OTHER; note = 2'-O-methylguanosine phosphorothioate
  modified_base 5: mod_base = OTHER; note = 2'-O-methyladenosine
  modified_base 6: mod_base = OTHER; note = 2'-O-methyladenosine
  modified_base 7: mod_base = OTHER; note = 2'-O-methyluridine
  modified_base 8: mod_base = OTHER; note = 2'-O-methyladenosine
  modified_base 9: mod_base = OTHER; note = 2'-O-methylguanosine
  modified_base 10: mod_base = OTHER; note = 2'-O-methyluridine
  modified_base 11: mod_base = OTHER; note = 2'-O-methyladenosine
  modified_base 12: mod_base = OTHER; note = 2'-O-methyluridine
  modified_base 13: mod_base = OTHER; note = 2'-O-methyladenosine
  modified_base 14: mod_base = OTHER; note = 2'-O-methyladenosine
  modified_base 15: mod_base = OTHER; note = 2'-O-methylcytidine
  modified_base 16: mod_base = OTHER; note = 2'-O-methyladenosine
  modified_base 17: mod_base = OTHER; note = 2'-O-methyladenosine
  modified_base 18: mod_base = OTHER; note = 2'-O-methyluridine
  modified_base 19: mod_base = OTHER; note = 2'-O-methyladenosine
  modified_base 20: mod_base = OTHER; note = 2'-O-methyluridine
  modified_base 21: mod_base = OTHER; note = 2'-O-methylguanosine
  modified_base 22: mod_base = OTHER; note = 2'-O-methylcytidine
  modified_base 23: mod_base = OTHER; note = 2'-O-methyluridine
  modified_base 24: mod_base = OTHER; note = 2'-O-methyladenosine
  modified_base 25: mod_base = OTHER; note = 2'-O-methyladenosine
  modified_base 26: mod_base = OTHER; note = 2'-O-methyladenosine
  modified_base 27: mod_base = OTHER; note = 2'-O-methyluridine
  modified_base 28: mod_base = OTHER; note = 2'-O-methylguanosine
  modified_base 29: mod_base = OTHER; note = 2'-O-methyluridine
  modified_base 30: mod_base = OTHER; note = 2'-O-methyluridine
  modified_base 31: mod_base = OTHER; note = 2'-O-methylguanosine
  modified_base 32: mod_base = OTHER; note = 2'-O-methyluridine
  modified_base 33: mod_base = OTHER; note = 2'-O-methyluridine
  modified_base 34: mod_base = OTHER; note = 2'-O-methyladenosine
  modified_base 35: mod_base = OTHER; note = 2'-O-methyluridine
  modified_base 36: mod_base = OTHER; note = 2'-O-methyladenosine
  modified_base 37: mod_base = OTHER; note = 2'-O-methylguanosine
  modified_base 38: mod_base = OTHER; note = 2'-O-methyluridine
  modified_base 39: mod_base = OTHER; note = 2'-O-methyladenosine
  modified_base 40: mod_base = OTHER; note = 2'-O-methyluridine
  modified_base 41: mod_base = OTHER; note = 2'-O-methylcytidine
  modified_base 42: mod_base = OTHER; note = 2'-O-methylcytidine
  modified_base 43: mod_base = OTHER; note = 2'-O-methylcytidine
  modified_base 44: mod_base = OTHER; note = 2'-O-methyladenosine
  modified_base 45: mod_base = OTHER; note = 2'-O-methylcytidine
  modified_base 46: mod_base = OTHER; note = 2'-O-methylcytidine
  modified_base 47: mod_base = OTHER; note = 2'-O-methyladenosine
  modified_base 48: mod_base = OTHER; note = 2'-O-methylguanosine
  modified_base 49: mod_base = OTHER; note = 2'-O-methylcytidine
  modified_base 50: mod_base = OTHER; note = 2'-O-methyluridine
  modified_base 51: mod_base = OTHER; note = 2'-O-methyluridine
  modified_base 52: mod_base = OTHER; note = 2'-fluoroarabinouridine
  modified_base 55: mod_base = OTHER; note = 2'-O-methyladenosine
  modified_base 56: mod_base = OTHER; note = 2'-O-methylcytidine
  modified_base 57: mod_base = OTHER; note = 2'-O-methyluridine
  modified_base 58: mod_base = OTHER; note = 2'-O-methyluridine
  modified_base 59: mod_base = OTHER; note = 2'-O-methylcytidine phosphorothioate
  modified_base 60: mod_base = OTHER; note = 2'-O-methylcytidine phosphorothioate
  modified_base 61: mod_base = OTHER; note = 2'-O-methyluridine phosphorothioate
  modified_base 62: mod_base = OTHER; note = 2'-O-methylguanosine phosphorothioate
  modified_base 63: mod_base = OTHER; note = 2'-O-methylcytidine
  misc_feature 1..52: note = RNA
  misc_feature 53..54: note = DNA
  misc_feature 55..63: note = RNA

SEQ ID NO: 213 - DNA, 63 bp, synthetic construct; identical to SEQ ID NO: 62
  source 1..63: mol_type = other DNA; note = Description of Artificial Sequence: Synthetic oligonucleotide; note = Description of Combined DNA/RNA Molecule: Synthetic oligonucleotide
  modified_base 1: mod_base = OTHER; note = 2'-O-methylguanosine phosphorothioate
  modified_base 2: mod_base = OTHER; note = 2'-O-methyluridine phosphorothioate
  modified_base 3: mod_base = OTHER; note = 2'-O-methylguanosine phosphorothioate
  modified_base 4: mod_base = OTHER; note = 2'-O-methylguanosine phosphorothioate
  modified_base 5: mod_base = OTHER; note = 2'-O-methyladenosine
  modified_base 6: mod_base = OTHER; note = 2'-O-methyladenosine
  modified_base 7: mod_base = OTHER; note = 2'-O-methyluridine
  modified_base 8: mod_base = OTHER; note = 2'-O-methyladenosine
  modified_base 9: mod_base = OTHER; note = 2'-O-methylguanosine
  modified_base 10: mod_base = OTHER; note = 2'-O-methyluridine
  modified_base 11: mod_base = OTHER; note = 2'-O-methyladenosine
  modified_base 12: mod_base = OTHER; note = 2'-O-methyluridine
  modified_base 13: mod_base = OTHER; note = 2'-O-methyladenosine
  modified_base 14: mod_base = OTHER; note = 2'-O-methyladenosine
  modified_base 15: mod_base = OTHER; note = 2'-O-methylcytidine
  modified_base 16: mod_base = OTHER; note = 2'-O-methyladenosine
  modified_base 17: mod_base = OTHER; note = 2'-O-methyladenosine
  modified_base 18: mod_base = OTHER; note = 2'-O-methyluridine
  modified_base 19: mod_base = OTHER; note = 2'-O-methyladenosine
  modified_base 20: mod_base = OTHER; note = 2'-O-methyluridine
  modified_base 21: mod_base = OTHER; note = 2'-O-methylguanosine
  modified_base 22: mod_base = OTHER; note = 2'-O-methylcytidine
  modified_base 23: mod_base = OTHER; note = 2'-O-methyluridine
  modified_base 24: mod_base = OTHER; note = 2'-O-methyladenosine
  modified_base 25: mod_base = OTHER; note = 2'-O-methyladenosine
  modified_base 26: mod_base = OTHER; note = 2'-O-methyladenosine
  modified_base 27: mod_base = OTHER; note = 2'-O-methyluridine
  modified_base 28: mod_base = OTHER; note = 2'-O-methylguanosine
  modified_base 29: mod_base = OTHER; note = 2'-O-methyluridine
  modified_base 30: mod_base = OTHER; note = 2'-O-methyluridine
  modified_base 31: mod_base = OTHER; note = 2'-O-methylguanosine
  modified_base 32: mod_base = OTHER; note = 2'-O-methyluridine
  modified_base 33: mod_base = OTHER; note = 2'-O-methyluridine
  modified_base 34: mod_base = OTHER; note = 2'-O-methyladenosine
  modified_base 35: mod_base = OTHER; note = 2'-O-methyluridine
  modified_base 36: mod_base = OTHER; note = 2'-O-methyladenosine
  modified_base 37: mod_base = OTHER; note = 2'-O-methylguanosine
  modified_base 38: mod_base = OTHER; note = 2'-O-methyluridine
  modified_base 39: mod_base = OTHER; note = 2'-O-methyladenosine
  modified_base 40: mod_base = OTHER; note = 2'-O-methyluridine
  modified_base 41: mod_base = OTHER; note = 2'-O-methylcytidine
  modified_base 42: mod_base = OTHER; note = 2'-O-methylcytidine
  modified_base 43: mod_base = OTHER; note = 2'-O-methylcytidine
  modified_base 44: mod_base = OTHER; note = 2'-O-methyladenosine
  modified_base 45: mod_base = OTHER; note = 2'-O-methylcytidine
  modified_base 46: mod_base = OTHER; note = 2'-O-methylcytidine
  modified_base 47: mod_base = OTHER; note = 2'-O-methyladenosine
  modified_base 48: mod_base = OTHER; note = 2'-O-methylguanosine
  modified_base 49: mod_base = OTHER; note = 2'-O-methylcytidine
  modified_base 50: mod_base = OTHER; note = 2'-O-methyluridine
  modified_base 51: mod_base = OTHER; note = 2'-O-methyluridine
  modified_base 53: mod_base = OTHER; note = 2'-fluoroarabinocytidine
  modified_base 55: mod_base = OTHER; note = 2'-O-methyladenosine
  modified_base 56: mod_base = OTHER; note = 2'-O-methylcytidine
  modified_base 57: mod_base = OTHER; note = 2'-O-methyluridine
  modified_base 58: mod_base = OTHER; note = 2'-O-methyluridine
  modified_base 59: mod_base = OTHER; note = 2'-O-methylcytidine phosphorothioate
  modified_base 60: mod_base = OTHER; note = 2'-O-methylcytidine phosphorothioate
  modified_base 61: mod_base = OTHER; note = 2'-O-methyluridine phosphorothioate
  modified_base 62: mod_base = OTHER; note = 2'-O-methylguanosine phosphorothioate
  modified_base 63: mod_base = OTHER; note = 2'-O-methylcytidine
  misc_feature 1..51: note = RNA
  misc_feature 52: note = DNA
  misc_feature 53: note = RNA
  misc_feature 54: note = DNA
  misc_feature 55..63: note = RNA

SEQ ID NO: 214 - DNA, 63 bp, synthetic construct; identical to SEQ ID NO: 62
  source 1..63: mol_type = other DNA; note = Description of Artificial Sequence: Synthetic oligonucleotide; note = Description of Combined DNA/RNA Molecule: Synthetic oligonucleotide
  modified_base 1: mod_base = OTHER; note = 2'-O-methylguanosine phosphorothioate
  modified_base 2: mod_base = OTHER; note = 2'-O-methyluridine phosphorothioate
  modified_base 3: mod_base = OTHER; note = 2'-O-methylguanosine phosphorothioate
  modified_base 4: mod_base = OTHER; note = 2'-O-methylguanosine phosphorothioate
  modified_base 5: mod_base = OTHER; note = 2'-O-methyladenosine
  modified_base 6: mod_base = OTHER; note = 2'-O-methyladenosine
  modified_base 7: mod_base = OTHER; note = 2'-O-methyluridine
  modified_base 8: mod_base = OTHER; note = 2'-O-methyladenosine
  modified_base 9: mod_base = OTHER; note = 2'-O-methylguanosine
  modified_base 10: mod_base = OTHER; note = 2'-O-methyluridine
  modified_base 11: mod_base = OTHER; note = 2'-O-methyladenosine
  modified_base 12: mod_base = OTHER; note = 2'-O-methyluridine
  modified_base 13: mod_base = OTHER; note = 2'-O-methyladenosine
  modified_base 14: mod_base = OTHER; note = 2'-O-methyladenosine
  modified_base 15: mod_base = OTHER; note = 2'-O-methylcytidine
  modified_base 16: mod_base = OTHER; note = 2'-O-methyladenosine
  modified_base 17: mod_base = OTHER; note = 2'-O-methyladenosine
  modified_base 18: mod_base = OTHER; note = 2'-O-methyluridine
  modified_base 19: mod_base = OTHER; note = 2'-O-methyladenosine
  modified_base 20: mod_base = OTHER; note = 2'-O-methyluridine
  modified_base 21: mod_base = OTHER; note = 2'-O-methylguanosine
  modified_base 22: mod_base = OTHER; note = 2'-O-methylcytidine
  modified_base 23: mod_base = OTHER; note = 2'-O-methyluridine
  modified_base 24: mod_base = OTHER; note = 2'-O-methyladenosine
  modified_base 25: mod_base = OTHER; note = 2'-O-methyladenosine
  modified_base 26: mod_base = OTHER; note = 2'-O-methyladenosine
  modified_base 27: mod_base = OTHER; note = 2'-O-methyluridine
  modified_base 28: mod_base = OTHER; note = 2'-O-methylguanosine
  modified_base 29: mod_base = OTHER; note = 2'-O-methyluridine
  modified_base 30: mod_base = OTHER; note = 2'-O-methyluridine
  modified_base 31: mod_base = OTHER; note = 2'-O-methylguanosine
  modified_base 32: mod_base = OTHER; note = 2'-O-methyluridine
  modified_base 33: mod_base = OTHER; note = 2'-O-methyluridine
  modified_base 34: mod_base = OTHER; note = 2'-O-methyladenosine
  modified_base 35: mod_base = OTHER; note = 2'-O-methyluridine
  modified_base 36: mod_base = OTHER; note = 2'-O-methyladenosine
  modified_base 37: mod_base = OTHER; note = 2'-O-methylguanosine
  modified_base 38: mod_base = OTHER; note = 2'-O-methyluridine
  modified_base 39: mod_base = OTHER; note = 2'-O-methyladenosine
  modified_base 40: mod_base = OTHER; note = 2'-O-methyluridine
  modified_base 41: mod_base = OTHER; note = 2'-O-methylcytidine
  modified_base 42: mod_base = OTHER; note = 2'-O-methylcytidine
  modified_base 43: mod_base = OTHER; note = 2'-O-methylcytidine
  modified_base 44: mod_base = OTHER; note = 2'-O-methyladenosine
  modified_base 45: mod_base = OTHER; note = 2'-O-methylcytidine
  modified_base 46: mod_base = OTHER; note = 2'-O-methylcytidine
  modified_base 47: mod_base = OTHER; note = 2'-O-methyladenosine
  modified_base 48: mod_base = OTHER; note = 2'-O-methylguanosine
  modified_base 49: mod_base = OTHER; note = 2'-O-methylcytidine
  modified_base 50: mod_base = OTHER; note = 2'-O-methyluridine
  modified_base 51: mod_base = OTHER; note = 2'-O-methyluridine
  modified_base 54: mod_base = OTHER; note = 2'-fluoroarabinocytidine
  modified_base 55: mod_base = OTHER; note = 2'-O-methyladenosine
  modified_base 56: mod_base = OTHER; note = 2'-O-methylcytidine
  modified_base 57: mod_base = OTHER; note = 2'-O-methyluridine
  modified_base 58: mod_base = OTHER; note = 2'-O-methyluridine
  modified_base 59: mod_base = OTHER; note = 2'-O-methylcytidine phosphorothioate
  modified_base 60: mod_base = OTHER; note = 2'-O-methylcytidine phosphorothioate
  modified_base 61: mod_base = OTHER; note = 2'-O-methyluridine phosphorothioate
  modified_base 62: mod_base = OTHER; note = 2'-O-methylguanosine phosphorothioate
  modified_base 63: mod_base = OTHER; note = 2'-O-methylcytidine
  misc_feature 1..51: note = RNA
  misc_feature 52..53: note = DNA
  misc_feature 54..63: note = RNA

SEQ ID NO: 215 - DNA, 63 bp, synthetic construct; identical to SEQ ID NO: 62
  source 1..63: mol_type = other DNA; note = Description of Artificial Sequence: Synthetic oligonucleotide; note = Description of Combined DNA/RNA Molecule: Synthetic oligonucleotide
  modified_base 1: mod_base = OTHER; note = 2'-O-methylguanosine phosphorothioate
  modified_base 2: mod_base = OTHER; note = 2'-O-methyluridine phosphorothioate
  modified_base 3: mod_base = OTHER; note = 2'-O-methylguanosine phosphorothioate
  modified_base 4: mod_base = OTHER; note = 2'-O-methylguanosine phosphorothioate
  modified_base 5: mod_base = OTHER; note = 2'-O-methyladenosine
  modified_base 6: mod_base = OTHER; note = 2'-O-methyladenosine
  modified_base 7: mod_base = OTHER; note = 2'-O-methyluridine
  modified_base 8: mod_base = OTHER; note = 2'-O-methyladenosine
  modified_base 9: mod_base = OTHER; note = 2'-O-methylguanosine
  modified_base 10: mod_base = OTHER; note = 2'-O-methyluridine
  modified_base 11: mod_base = OTHER; note = 2'-O-methyladenosine
  modified_base 12: mod_base = OTHER; note = 2'-O-methyluridine
  modified_base 13: mod_base = OTHER; note = 2'-O-methyladenosine
  modified_base 14: mod_base = OTHER; note = 2'-O-methyladenosine
  modified_base 15: mod_base = OTHER; note = 2'-O-methylcytidine
  modified_base 16: mod_base = OTHER; note = 2'-O-methyladenosine
  modified_base 17: mod_base = OTHER; note = 2'-O-methyladenosine
  modified_base 18: mod_base = OTHER; note = 2'-O-methyluridine
  modified_base 19: mod_base = OTHER; note = 2'-O-methyladenosine
  modified_base 20: mod_base = OTHER; note = 2'-O-methyluridine
  modified_base 21: mod_base = OTHER; note = 2'-O-methylguanosine
  modified_base 22: mod_base = OTHER; note = 2'-O-methylcytidine
  modified_base 23: mod_base = OTHER; note = 2'-O-methyluridine
  modified_base 24: mod_base = OTHER; note = 2'-O-methyladenosine
  modified_base 25: mod_base = OTHER; note = 2'-O-methyladenosine
  modified_base 26: mod_base = OTHER; note = 2'-O-methyladenosine
  modified_base 27: mod_base = OTHER; note = 2'-O-methyluridine
  modified_base 28: mod_base = OTHER; note = 2'-O-methylguanosine
  modified_base 29: mod_base = OTHER; note = 2'-O-methyluridine
  modified_base 30: mod_base = OTHER; note = 2'-O-methyluridine
  modified_base 31: mod_base = OTHER; note = 2'-O-methylguanosine
  modified_base 32: mod_base = OTHER; note = 2'-O-methyluridine
  modified_base 33: mod_base = OTHER; note = 2'-O-methyluridine
  modified_base 34: mod_base = OTHER; note = 2'-O-methyladenosine
  modified_base 35: mod_base = OTHER; note = 2'-O-methyluridine
  modified_base 36: mod_base = OTHER; note = 2'-O-methyladenosine
  modified_base 37: mod_base = OTHER; note = 2'-O-methylguanosine
  modified_base 38: mod_base = OTHER; note = 2'-O-methyluridine
  modified_base 39: mod_base = OTHER; note = 2'-O-methyladenosine
  modified_base 40: mod_base = OTHER; note = 2'-O-methyluridine
  modified_base 41: mod_base = OTHER; note = 2'-O-methylcytidine
  modified_base 42: mod_base = OTHER; note = 2'-O-methylcytidine
  modified_base 43: mod_base = OTHER; note = 2'-O-methylcytidine
  modified_base 44: mod_base = OTHER; note = 2'-O-methyladenosine
  modified_base 45: mod_base = OTHER; note = 2'-O-methylcytidine
  modified_base 46: mod_base = OTHER; note = 2'-O-methylcytidine
  modified_base 47: mod_base = OTHER; note = 2'-O-methyladenosine
  modified_base 48: mod_base = OTHER; note = 2'-O-methylguanosine
  modified_base 49: mod_base = OTHER; note = 2'-O-methylcytidine
  modified_base 50: mod_base = OTHER; note = 2'-O-methyluridine
  modified_base 51: mod_base = OTHER; note = 2'-O-methyluridine
  modified_base 53: mod_base = OTHER; note = 2'-fluoroarabinocytidine
  modified_base 54: mod_base = OTHER; note = 2'-fluoroarabinocytidine
  modified_base 55: mod_base = OTHER; note = 2'-O-methyladenosine
  modified_base 56: mod_base = OTHER; note = 2'-O-methylcytidine
  modified_base 57: mod_base = OTHER; note = 2'-O-methyluridine
  modified_base 58: mod_base = OTHER; note = 2'-O-methyluridine
  modified_base 59: mod_base = OTHER; note = 2'-O-methylcytidine phosphorothioate
  modified_base 60: mod_base = OTHER; note = 2'-O-methylcytidine phosphorothioate
  modified_base 61: mod_base = OTHER; note = 2'-O-methyluridine phosphorothioate
  modified_base 62: mod_base = OTHER; note = 2'-O-methylguanosine phosphorothioate
  modified_base 63: mod_base = OTHER; note = 2'-O-methylcytidine
  misc_feature 1..51: note = RNA
  misc_feature 52: note = DNA
  misc_feature 53..63: note = RNA

SEQ ID NO: 216 - DNA, 63 bp, synthetic construct; identical to SEQ ID NO: 62
  source 1..63: mol_type = other DNA; note = Description of Artificial Sequence: Synthetic oligonucleotide; note = Description of Combined DNA/RNA Molecule: Synthetic oligonucleotide
  modified_base 1: mod_base = OTHER; note = 2'-O-methylguanosine phosphorothioate
  modified_base 2: mod_base = OTHER; note = 2'-O-methyluridine phosphorothioate
  modified_base 3: mod_base = OTHER; note = 2'-O-methylguanosine phosphorothioate
  modified_base 4: mod_base = OTHER; note = 2'-O-methylguanosine phosphorothioate
  modified_base 5: mod_base = OTHER; note = 2'-O-methyladenosine
  modified_base 6: mod_base = OTHER; note = 2'-O-methyladenosine
  modified_base 7: mod_base = OTHER; note = 2'-O-methyluridine
  modified_base 8: mod_base = OTHER; note = 2'-O-methyladenosine
  modified_base 9: mod_base = OTHER; note = 2'-O-methylguanosine
  modified_base 10: mod_base = OTHER; note = 2'-O-methyluridine
  modified_base 11: mod_base = OTHER; note = 2'-O-methyladenosine
  modified_base 12: mod_base = OTHER; note = 2'-O-methyluridine
  modified_base 13: mod_base = OTHER; note = 2'-O-methyladenosine
  modified_base 14: mod_base = OTHER; note = 2'-O-methyladenosine
  modified_base 15: mod_base = OTHER; note = 2'-O-methylcytidine
  modified_base 16: mod_base = OTHER; note = 2'-O-methyladenosine
  modified_base 17: mod_base = OTHER; note = 2'-O-methyladenosine
  modified_base 18: mod_base = OTHER; note = 2'-O-methyluridine
  modified_base 19: mod_base = OTHER; note = 2'-O-methyladenosine
  modified_base 20: mod_base = OTHER; note = 2'-O-methyluridine
  modified_base 21: mod_base = OTHER; note = 2'-O-methylguanosine
  modified_base 22: mod_base = OTHER; note = 2'-O-methylcytidine
  modified_base 23: mod_base = OTHER; note = 2'-O-methyluridine
  modified_base 24: mod_base = OTHER; note = 2'-O-methyladenosine
  modified_base 25: mod_base = OTHER; note = 2'-O-methyladenosine
  modified_base 26: mod_base = OTHER; note = 2'-O-methyladenosine
  modified_base 27: mod_base = OTHER; note = 2'-O-methyluridine
  modified_base 28: mod_base = OTHER; note = 2'-O-methylguanosine
  modified_base 29: mod_base = OTHER; note = 2'-O-methyluridine
  modified_base 30: mod_base = OTHER; note = 2'-O-methyluridine
  modified_base 31: mod_base = OTHER; note = 2'-O-methylguanosine
  modified_base 32: mod_base = OTHER; note = 2'-O-methyluridine
  modified_base 33: mod_base = OTHER; note = 2'-O-methyluridine
  modified_base 34: mod_base = OTHER; note = 2'-O-methyladenosine
  modified_base 35: mod_base = OTHER; note = 2'-O-methyluridine
  modified_base 36: mod_base = OTHER; note = 2'-O-methyladenosine
  modified_base 37: mod_base = OTHER; note = 2'-O-methylguanosine
  modified_base 38: mod_base = OTHER; note = 2'-O-methyluridine
  modified_base 39: mod_base = OTHER; note = 2'-O-methyladenosine
  modified_base 40: mod_base = OTHER; note = 2'-O-methyluridine
  modified_base 41: mod_base = OTHER; note = 2'-O-methylcytidine
  modified_base 42: mod_base = OTHER; note = 2'-O-methylcytidine
  modified_base 43: mod_base = OTHER; note = 2'-O-methylcytidine
  modified_base 44: mod_base = OTHER; note = 2'-O-methyladenosine
  modified_base 45: mod_base = OTHER; note = 2'-O-methylcytidine
  modified_base 46: mod_base = OTHER; note = 2'-O-methylcytidine
  modified_base 47: mod_base = OTHER; note = 2'-O-methyladenosine
  modified_base 48: mod_base = OTHER; note = 2'-O-methylguanosine
  modified_base 49: mod_base = OTHER; note = 2'-O-methylcytidine
  modified_base 50: mod_base = OTHER; note = 2'-O-methyluridine
  modified_base 51: mod_base = OTHER; note = 2'-O-methyluridine
  modified_base 52: mod_base = OTHER; note = 2'-fluoroarabinouridine
  modified_base 53: mod_base = OTHER; note = 2'-fluoroarabinocytidine
  modified_base 55: mod_base = OTHER; note = 2'-O-methyladenosine
  modified_base 56: mod_base = OTHER; note = 2'-O-methylcytidine
  modified_base 57: mod_base = OTHER; note = 2'-O-methyluridine
  modified_base 58: mod_base = OTHER; note = 2'-O-methyluridine
  modified_base 59: mod_base = OTHER; note = 2'-O-methylcytidine phosphorothioate
  modified_base 60: mod_base = OTHER; note = 2'-O-methylcytidine phosphorothioate
  modified_base 61: mod_base = OTHER; note = 2'-O-methyluridine phosphorothioate
  modified_base 62: mod_base = OTHER; note = 2'-O-methylguanosine phosphorothioate
  modified_base 63: mod_base = OTHER; note = 2'-O-methylcytidine
  misc_feature 1..53: note = RNA
  misc_feature 54: note = DNA
  misc_feature 55..63: note = RNA

SEQ ID NO: 217 - RNA, 63 nt, synthetic construct
  source 1..63: mol_type = other RNA; note = Description of Artificial Sequence: Synthetic oligonucleotide
  modified_base 1: mod_base = OTHER; note = 2'-O-methylguanosine phosphorothioate
  modified_base 2: mod_base = OTHER; note = 2'-O-methyluridine phosphorothioate
  modified_base 3: mod_base = OTHER; note = 2'-O-methylguanosine phosphorothioate
  modified_base 4: mod_base = OTHER; note = 2'-O-methylguanosine phosphorothioate
  modified_base 5: mod_base = OTHER; note = 2'-O-methyladenosine
  modified_base 6: mod_base = OTHER; note = 2'-O-methyladenosine
  modified_base 7: mod_base = OTHER; note = 2'-O-methyluridine
  modified_base 8: mod_base = OTHER; note = 2'-O-methyladenosine
  modified_base 9: mod_base = OTHER; note = 2'-O-methylguanosine
  modified_base 10: mod_base = OTHER; note = 2'-O-methyluridine
  modified_base 11: mod_base = OTHER; note = 2'-O-methyladenosine
  modified_base 12: mod_base = OTHER; note = 2'-O-methyluridine
  modified_base 13: mod_base = OTHER; note = 2'-O-methyladenosine
  modified_base 14: mod_base = OTHER; note = 2'-O-methyladenosine
  modified_base 15: mod_base = OTHER; note = 2'-O-methylcytidine
  modified_base 16: mod_base = OTHER; note = 2'-O-methyladenosine
  modified_base 17: mod_base = OTHER; note = 2'-O-methyladenosine
  modified_base 18: mod_base = OTHER; note = 2'-O-methyluridine
  modified_base 19: mod_base = OTHER; note = 2'-O-methyladenosine
  modified_base 20: mod_base = OTHER; note = 2'-O-methyluridine
  modified_base 21: mod_base = OTHER; note = 2'-O-methylguanosine
  modified_base 22: mod_base = OTHER; note = 2'-O-methylcytidine
  modified_base 23: mod_base = OTHER; note = 2'-O-methyluridine
  modified_base 24: mod_base = OTHER; note = 2'-O-methyladenosine
  modified_base 25: mod_base = OTHER; note = 2'-O-methyladenosine
  modified_base 26: mod_base = OTHER; note = 2'-O-methyladenosine
  modified_base 27: mod_base = OTHER; note = 2'-O-methyluridine
  modified_base 28: mod_base = OTHER; note = 2'-O-methylguanosine
  modified_base 29: mod_base = OTHER; note = 2'-O-methyluridine
  modified_base 30: mod_base = OTHER; note = 2'-O-methyluridine
  modified_base 31: mod_base = OTHER; note = 2'-O-methylguanosine
  modified_base 32: mod_base = OTHER; note = 2'-O-methyluridine
  modified_base 33: mod_base = OTHER; note = 2'-O-methyluridine
  modified_base 34: mod_base = OTHER; note = 2'-O-methyladenosine
  modified_base 35: mod_base = OTHER; note = 2'-O-methyluridine
  modified_base 36: mod_base = OTHER; note = 2'-O-methyladenosine
  modified_base 37: mod_base = OTHER; note = 2'-O-methylguanosine
  modified_base 38: mod_base = OTHER; note = 2'-O-methyluridine
  modified_base 39: mod_base = OTHER; note = 2'-O-methyladenosine
  modified_base 40: mod_base = OTHER; note = 2'-O-methyluridine
  modified_base 41: mod_base = OTHER; note = 2'-O-methylcytidine
  modified_base 42: mod_base = OTHER; note = 2'-O-methylcytidine
  modified_base 43: mod_base = OTHER; note = 2'-O-methylcytidine
  modified_base 44: mod_base = OTHER; note = 2'-O-methyladenosine
  modified_base 45: mod_base = OTHER; note = 2'-O-methylcytidine
  modified_base 46: mod_base = OTHER; note = 2'-O-methylcytidine
  modified_base 47: mod_base = OTHER; note = 2'-O-methyladenosine
  modified_base 48: mod_base = OTHER; note = 2'-O-methylguanosine
  modified_base 49: mod_base = OTHER; note = 2'-O-methylcytidine
  modified_base 50: mod_base = OTHER; note = 2'-O-methyluridine
  modified_base 51: mod_base = OTHER; note = 2'-O-methyluridine
  modified_base 52: mod_base = OTHER; note = 2'-fluoroarabinouridine
  modified_base 53: mod_base = OTHER; note = 2'-fluoroarabinocytidine
  modified_base 54: mod_base = OTHER; note = 2'-fluoroarabinocytidine
  modified_base 55: mod_base = OTHER; note = 2'-O-methyladenosine
  modified_base 56: mod_base = OTHER; note = 2'-O-methylcytidine
  modified_base 57: mod_base = OTHER; note = 2'-O-methyluridine
  modified_base 58: mod_base = OTHER; note = 2'-O-methyluridine
  modified_base 59: mod_base = OTHER; note = 2'-O-methylcytidine phosphorothioate
  modified_base 60: mod_base = OTHER; note = 2'-O-methylcytidine phosphorothioate
  modified_base 61: mod_base = OTHER; note = 2'-O-methyluridine phosphorothioate
  modified_base 62: mod_base = OTHER; note = 2'-O-methylguanosine phosphorothioate
  modified_base 63: mod_base = OTHER; note = 2'-O-methylcytidine
gtggaatagtataacaatatgctaaatgttgttatagtatcccaccagctttccacttcctgc

SEQ ID NO: 218 - DNA, 63 bp, synthetic construct; identical to SEQ ID NO: 62
  source 1..63: mol_type = other DNA; note = Description of Artificial Sequence: Synthetic oligonucleotide; note = Description of Combined DNA/RNA Molecule: Synthetic oligonucleotide
  modified_base 1: mod_base = OTHER; note = 2'-O-methylguanosine phosphorothioate
  modified_base 2: mod_base = OTHER; note = 2'-O-methyluridine phosphorothioate
  modified_base 3: mod_base = OTHER; note = 2'-O-methylguanosine phosphorothioate
  modified_base 4: mod_base = OTHER; note = 2'-O-methylguanosine phosphorothioate
  modified_base 5: mod_base = OTHER; note = 2'-O-methyladenosine
  modified_base 6: mod_base = OTHER; note = 2'-O-methyladenosine
  modified_base 7: mod_base = OTHER; note = 2'-O-methyluridine
  modified_base 8: mod_base = OTHER; note = 2'-O-methyladenosine
  modified_base 9: mod_base = OTHER; note = 2'-O-methylguanosine
  modified_base 10: mod_base = OTHER; note = 2'-O-methyluridine
  modified_base 11: mod_base = OTHER; note = 2'-O-methyladenosine
  modified_base 12: mod_base = OTHER; note = 2'-O-methyluridine
  modified_base 13: mod_base = OTHER; note = 2'-O-methyladenosine
  modified_base 14: mod_base = OTHER; note = 2'-O-methyladenosine
  modified_base 15: mod_base = OTHER; note = 2'-O-methylcytidine
  modified_base 16: mod_base = OTHER; note = 2'-O-methyladenosine
  modified_base 17: mod_base = OTHER; note = 2'-O-methyladenosine
  modified_base 18: mod_base = OTHER; note = 2'-O-methyluridine
  modified_base 19: mod_base = OTHER; note = 2'-O-methyladenosine
  modified_base 20: mod_base = OTHER; note = 2'-O-methyluridine
  modified_base 21: mod_base = OTHER; note = 2'-O-methylguanosine
  modified_base 22: mod_base = OTHER; note = 2'-O-methylcytidine
  modified_base 23: mod_base = OTHER; note = 2'-O-methyluridine
  modified_base 24: mod_base = OTHER; note = 2'-O-methyladenosine
  modified_base 25: mod_base = OTHER; note = 2'-O-methyladenosine
  modified_base 26: mod_base = OTHER; note = 2'-O-methyladenosine
  modified_base 27: mod_base = OTHER; note = 2'-O-methyluridine
  modified_base 28: mod_base = OTHER; note = 2'-O-methylguanosine
  modified_base 29: mod_base = OTHER; note = 2'-O-methyluridine
  modified_base 30: mod_base = OTHER; note = 2'-O-methyluridine
  modified_base 31: mod_base = OTHER; note = 2'-O-methylguanosine
  modified_base 32: mod_base = OTHER; note = 2'-O-methyluridine
  modified_base 33: mod_base = OTHER; note = 2'-O-methyluridine
  modified_base 34: mod_base = OTHER; note = 2'-O-methyladenosine
  modified_base 35: mod_base = OTHER; note = 2'-O-methyluridine
  modified_base 36: mod_base = OTHER; note = 2'-O-methyladenosine
  modified_base 37: mod_base = OTHER; note = 2'-O-methylguanosine
  modified_base 38: mod_base = OTHER; note = 2'-O-methyluridine
  modified_base 39: mod_base = OTHER; note = 2'-O-methyladenosine
  modified_base 40: mod_base = OTHER; note = 2'-O-methyluridine
  modified_base 41: mod_base = OTHER; note = 2'-O-methylcytidine
  modified_base 42: mod_base = OTHER; note = 2'-O-methylcytidine
  modified_base 43: mod_base = OTHER; note = 2'-O-methylcytidine
  modified_base 44: mod_base = OTHER; note = 2'-O-methyladenosine
  modified_base 45: mod_base = OTHER; note = 2'-O-methylcytidine
  modified_base 46: mod_base = OTHER; note = 2'-O-methylcytidine
  modified_base 47: mod_base = OTHER; note = 2'-O-methyladenosine
  modified_base 48: mod_base = OTHER; note = 2'-O-methylguanosine
  modified_base 49: mod_base = OTHER; note = 2'-O-methylcytidine
  modified_base 50: mod_base = OTHER; note = 2'-O-methyluridine
  modified_base 51: mod_base = OTHER; note = 2'-O-methyluridine
  modified_base 52: mod_base = OTHER; note = Arabinouridine
  modified_base 55: mod_base = OTHER; note = 2'-O-methyladenosine
  modified_base 56: mod_base = OTHER; note = 2'-O-methylcytidine
  modified_base 57: mod_base = OTHER; note = 2'-O-methyluridine
  modified_base 58: mod_base = OTHER; note = 2'-O-methyluridine
  modified_base 59: mod_base = OTHER; note = 2'-O-methylcytidine phosphorothioate
  modified_base 60: mod_base = OTHER; note = 2'-O-methylcytidine phosphorothioate
  modified_base 61: mod_base = OTHER; note = 2'-O-methyluridine phosphorothioate
  modified_base 62: mod_base = OTHER; note = 2'-O-methylguanosine phosphorothioate
  modified_base 63: mod_base = OTHER; note = 2'-O-methylcytidine
  misc_feature 1..52: note = RNA
  misc_feature 53..54: note = DNA
  misc_feature 55..63: note = RNA

SEQ ID NO: 219 - DNA, 63 bp, synthetic construct; identical to SEQ ID NO: 62
  source 1..63: mol_type = other DNA; note = Description of Artificial Sequence: Synthetic oligonucleotide; note = Description of Combined DNA/RNA Molecule: Synthetic oligonucleotide
  modified_base 1: mod_base = OTHER; note = 2'-O-methylguanosine phosphorothioate
  modified_base 2: mod_base = OTHER; note = 2'-O-methyluridine phosphorothioate
  modified_base 3: mod_base = OTHER; note = 2'-O-methylguanosine phosphorothioate
  modified_base 4: mod_base = OTHER; note = 2'-O-methylguanosine phosphorothioate
  modified_base 5: mod_base = OTHER; note = 2'-O-methyladenosine
  modified_base 6: mod_base = OTHER; note = 2'-O-methyladenosine
  modified_base 7: mod_base = OTHER; note = 2'-O-methyluridine
  modified_base 8: mod_base = OTHER; note = 2'-O-methyladenosine
  modified_base 9: mod_base = OTHER; note = 2'-O-methylguanosine
  modified_base 10: mod_base = OTHER; note = 2'-O-methyluridine
  modified_base 11: mod_base = OTHER; note = 2'-O-methyladenosine
  modified_base 12: mod_base = OTHER; note = 2'-O-methyluridine
  modified_base 13: mod_base = OTHER; note = 2'-O-methyladenosine
  modified_base 14: mod_base = OTHER; note = 2'-O-methyladenosine
  modified_base 15: mod_base = OTHER; note = 2'-O-methylcytidine
  modified_base 16: mod_base = OTHER; note = 2'-O-methyladenosine
  modified_base 17: mod_base = OTHER; note = 2'-O-methyladenosine
  modified_base 18: mod_base = OTHER; note = 2'-O-methyluridine
  modified_base 19: mod_base = OTHER; note = 2'-O-methyladenosine
  modified_base 20: mod_base = OTHER; note = 2'-O-methyluridine
  modified_base 21: mod_base = OTHER; note = 2'-O-methylguanosine
  modified_base 22: mod_base = OTHER; note = 2'-O-methylcytidine
  modified_base 23: mod_base = OTHER; note = 2'-O-methyluridine
  modified_base 24: mod_base = OTHER; note = 2'-O-methyladenosine
  modified_base 25: mod_base = OTHER; note = 2'-O-methyladenosine
  modified_base 26: mod_base = OTHER; note = 2'-O-methyladenosine
  modified_base 27: mod_base = OTHER; note = 2'-O-methyluridine
  modified_base 28: mod_base = OTHER; note = 2'-O-methylguanosine
  modified_base 29: mod_base = OTHER; note = 2'-O-methyluridine
  modified_base 30: mod_base = OTHER; note = 2'-O-methyluridine
  modified_base 31: mod_base = OTHER; note = 2'-O-methylguanosine
  modified_base 32: mod_base = OTHER; note = 2'-O-methyluridine
  modified_base 33: mod_base = OTHER; note = 2'-O-methyluridine
  modified_base 34: mod_base = OTHER; note = 2'-O-methyladenosine
  modified_base 35: mod_base = OTHER; note = 2'-O-methyluridine
  modified_base 36: mod_base = OTHER; note = 2'-O-methyladenosine
  modified_base 37: mod_base = OTHER; note = 2'-O-methylguanosine
  modified_base 38: mod_base = OTHER; note = 2'-O-methyluridine
  modified_base 39: mod_base = OTHER; note = 2'-O-methyladenosine
  modified_base 40: mod_base = OTHER; note = 2'-O-methyluridine
  modified_base 41: mod_base = OTHER; note = 2'-O-methylcytidine
  modified_base 42: mod_base = OTHER; note = 2'-O-methylcytidine
  modified_base 43: mod_base = OTHER; note = 2'-O-methylcytidine
  modified_base 44: mod_base = OTHER; note = 2'-O-methyladenosine
  modified_base 45: mod_base = OTHER; note = 2'-O-methylcytidine
  modified_base 46: mod_base = OTHER; note = 2'-O-methylcytidine
  modified_base 47: mod_base = OTHER; note = 2'-O-methyladenosine
  modified_base 48: mod_base = OTHER; note = 2'-O-methylguanosine
  modified_base 49: mod_base = OTHER; note = 2'-O-methylcytidine
  modified_base 50: mod_base = OTHER; note = 2'-O-methyluridine
  modified_base 51: mod_base = OTHER; note = 2'-O-methyluridine
  modified_base 53: mod_base = OTHER; note = Arabinocytidine
  modified_base 55: mod_base = OTHER; note = 2'-O-methyladenosine
  modified_base 56: mod_base = OTHER; note = 2'-O-methylcytidine
  modified_base 57: mod_base = OTHER; note = 2'-O-methyluridine
  modified_base 58: mod_base = OTHER; note = 2'-O-methyluridine
  modified_base 59: mod_base = OTHER; note = 2'-O-methylcytidine phosphorothioate
  modified_base 60: mod_base = OTHER; note = 2'-O-methylcytidine phosphorothioate
  modified_base 61: mod_base = OTHER; note = 2'-O-methyluridine phosphorothioate
  modified_base 62: mod_base = OTHER; note = 2'-O-methylguanosine phosphorothioate
  modified_base 63: mod_base = OTHER; note = 2'-O-methylcytidine
  misc_feature 1..51: note = RNA
  misc_feature 52: note = DNA
  misc_feature 53: note = RNA
  misc_feature 54: note = DNA
  misc_feature 55..63: note = RNA

SEQ ID NO: 220 - DNA, 63 bp, synthetic construct; identical to SEQ ID NO: 62
  source 1..63: mol_type = other DNA; note = Description of Artificial Sequence: Synthetic oligonucleotide; note = Description of Combined DNA/RNA Molecule: Synthetic oligonucleotide
  modified_base 1: mod_base = OTHER; note = 2'-O-methylguanosine phosphorothioate
  modified_base 2: mod_base = OTHER; note = 2'-O-methyluridine phosphorothioate
  modified_base 3: mod_base = OTHER; note = 2'-O-methylguanosine phosphorothioate
  modified_base 4: mod_base = OTHER; note = 2'-O-methylguanosine phosphorothioate
  modified_base 5: mod_base = OTHER; note = 2'-O-methyladenosine
  modified_base 6: mod_base = OTHER; note = 2'-O-methyladenosine
  modified_base 7: mod_base = OTHER; note = 2'-O-methyluridine
  modified_base 8: mod_base = OTHER; note = 2'-O-methyladenosine
  modified_base 9: mod_base = OTHER; note = 2'-O-methylguanosine
  modified_base 10: mod_base = OTHER; note = 2'-O-methyluridine
  modified_base 11: mod_base = OTHER; note = 2'-O-methyladenosine
  modified_base 12: mod_base = OTHER; note = 2'-O-methyluridine
  modified_base 13: mod_base = OTHER; note = 2'-O-methyladenosine
  modified_base 14: mod_base = OTHER; note = 2'-O-methyladenosine
  modified_base 15: mod_base = OTHER; note = 2'-O-methylcytidine
  modified_base 16: mod_base = OTHER; note = 2'-O-methyladenosine
  modified_base 17: mod_base = OTHER; note = 2'-O-methyladenosine
  modified_base 18: mod_base = OTHER; note = 2'-O-methyluridine
  modified_base 19: mod_base = OTHER; note = 2'-O-methyladenosine
  modified_base 20: mod_base = OTHER; note = 2'-O-methyluridine
  modified_base 21: mod_base = OTHER; note = 2'-O-methylguanosine
  modified_base 22: mod_base = OTHER; note = 2'-O-methylcytidine
  modified_base 23: mod_base = OTHER; note = 2'-O-methyluridine
  modified_base 24: mod_base = OTHER; note = 2'-O-methyladenosine
  modified_base 25: mod_base = OTHER; note = 2'-O-methyladenosine
  modified_base 26: mod_base = OTHER; note = 2'-O-methyladenosine
  modified_base 27: mod_base = OTHER; note = 2'-O-methyluridine
  modified_base 28: mod_base = OTHER; note = 2'-O-methylguanosine
  modified_base 29: mod_base = OTHER; note = 2'-O-methyluridine
  modified_base 30: mod_base = OTHER; note = 2'-O-methyluridine
  modified_base 31: mod_base = OTHER; note = 2'-O-methylguanosine
  modified_base 32: mod_base = OTHER; note = 2'-O-methyluridine
  modified_base 33: mod_base = OTHER; note = 2'-O-methyluridine
  modified_base 34: mod_base = OTHER; note = 2'-O-methyladenosine
  modified_base 35: mod_base = OTHER; note = 2'-O-methyluridine
  modified_base 36: mod_base = OTHER; note = 2'-O-methyladenosine
  modified_base 37: mod_base = OTHER; note = 2'-O-methylguanosine
  modified_base 38: mod_base = OTHER; note = 2'-O-methyluridine
  modified_base 39: mod_base = OTHER; note = 2'-O-methyladenosine
  modified_base 40: mod_base = OTHER; note = 2'-O-methyluridine
  modified_base 41: mod_base = OTHER; note = 2'-O-methylcytidine
  modified_base 42: mod_base = OTHER; note = 2'-O-methylcytidine
  modified_base 43: mod_base = OTHER; note = 2'-O-methylcytidine
  modified_base 44: mod_base = OTHER; note = 2'-O-methyladenosine
  modified_base 45: mod_base = OTHER; note = 2'-O-methylcytidine
  modified_base 46: mod_base = OTHER; note = 2'-O-methylcytidine
  modified_base 47: mod_base = OTHER; note = 2'-O-methyladenosine
  modified_base 48: mod_base = OTHER; note = 2'-O-methylguanosine
  modified_base 49: mod_base = OTHER; note = 2'-O-methylcytidine
  modified_base 50: mod_base = OTHER; note = 2'-O-methyluridine
  modified_base 51: mod_base = OTHER; note = 2'-O-methyluridine
  modified_base 54: mod_base = OTHER; note = Arabinocytidine
  modified_base 55: mod_base = OTHER; note = 2'-O-methyladenosine
  modified_base 56: mod_base = OTHER; note = 2'-O-methylcytidine
  modified_base 57: mod_base = OTHER; note = 2'-O-methyluridine
  modified_base 58: mod_base = OTHER; note = 2'-O-methyluridine
  modified_base 59: mod_base = OTHER; note = 2'-O-methylcytidine phosphorothioate
  modified_base 60: mod_base = OTHER; note = 2'-O-methylcytidine phosphorothioate
  modified_base 61: mod_base = OTHER; note = 2'-O-methyluridine phosphorothioate
  modified_base 62: mod_base = OTHER; note = 2'-O-methylguanosine phosphorothioate
  modified_base 63: mod_base = OTHER; note = 2'-O-methylcytidine
  misc_feature 1..51: note = RNA
  misc_feature 52..53: note = DNA
  misc_feature 54..63: note = RNA

SEQ ID NO: 221 - RNA, 63 nt, synthetic construct; identical to SEQ ID NO: 217
  source 1..63: mol_type = other RNA; note = Description of Artificial Sequence: Synthetic oligonucleotide
  modified_base 1: mod_base = OTHER; note = 2'-O-methylguanosine phosphorothioate
  modified_base 2: mod_base = OTHER; note = 2'-O-methyluridine phosphorothioate
  modified_base 3: mod_base = OTHER; note = 2'-O-methylguanosine phosphorothioate
  modified_base 4: mod_base = OTHER; note = 2'-O-methylguanosine phosphorothioate
  modified_base 5: mod_base = OTHER; note = 2'-O-methyladenosine
  modified_base 6: mod_base = OTHER; note = 2'-O-methyladenosine
  modified_base 7: mod_base = OTHER; note = 2'-O-methyluridine
  modified_base 8: mod_base = OTHER; note = 2'-O-methyladenosine
  modified_base 9: mod_base = OTHER; note = 2'-O-methylguanosine
  modified_base 10: mod_base = OTHER; note = 2'-O-methyluridine
  modified_base 11: mod_base = OTHER; note = 2'-O-methyladenosine
  modified_base 12: mod_base = OTHER; note = 2'-O-methyluridine
  modified_base 13: mod_base = OTHER; note = 2'-O-methyladenosine
  modified_base 14: mod_base = OTHER; note = 2'-O-methyladenosine
  modified_base 15: mod_base = OTHER; note = 2'-O-methylcytidine
  modified_base 16: mod_base = OTHER; note = 2'-O-methyladenosine
  modified_base 17: mod_base = OTHER; note = 2'-O-methyladenosine
  modified_base 18: mod_base = OTHER; note = 2'-O-methyluridine
  modified_base 19: mod_base = OTHER; note = 2'-O-methyladenosine
  modified_base 20: mod_base = OTHER; note = 2'-O-methyluridine
  modified_base 21: mod_base = OTHER; note = 2'-O-methylguanosine
  modified_base 22: mod_base = OTHER; note = 2'-O-methylcytidine
  modified_base 23: mod_base = OTHER; note = 2'-O-methyluridine
  modified_base 24: mod_base = OTHER; note = 2'-O-methyladenosine
  modified_base 25: mod_base = OTHER; note = 2'-O-methyladenosine
  modified_base 26: mod_base = OTHER; note = 2'-O-methyladenosine
  modified_base 27: mod_base = OTHER; note = 2'-O-methyluridine
  modified_base 28: mod_base = OTHER; note = 2'-O-methylguanosine
  modified_base 29: mod_base = OTHER; note = 2'-O-methyluridine
  modified_base 30: mod_base = OTHER; note = 2'-O-methyluridine
  modified_base 31: mod_base = OTHER; note = 2'-O-methylguanosine
  modified_base 32: mod_base = OTHER; note = 2'-O-methyluridine
  modified_base 33: mod_base = OTHER; note = 2'-O-methyluridine
  modified_base 34: mod_base = OTHER; note = 2'-O-methyladenosine
  modified_base 35: mod_base = OTHER; note = 2'-O-methyluridine
  modified_base 36: mod_base = OTHER; note = 2'-O-methyladenosine
  modified_base 37: mod_base = OTHER; note = 2'-O-methylguanosine
  modified_base 38: mod_base = OTHER; note = 2'-O-methyluridine
  modified_base 39: mod_base = OTHER; note = 2'-O-methyladenosine
  modified_base 40: mod_base = OTHER; note = 2'-O-methyluridine
  modified_base 41: mod_base = OTHER; note = 2'-O-methylcytidine
  modified_base 42: mod_base = OTHER; note = 2'-O-methylcytidine
  modified_base 43: mod_base = OTHER; note = 2'-O-methylcytidine
  modified_base 44: mod_base = OTHER; note = 2'-O-methyladenosine
  modified_base 45: mod_base = OTHER; note = 2'-O-methylcytidine
  modified_base 46: mod_base = OTHER; note = 2'-O-methylcytidine
  modified_base 47: mod_base = OTHER; note = 2'-O-methyladenosine
  modified_base 48: mod_base = OTHER; note = 2'-O-methylguanosine
  modified_base 49: mod_base = OTHER; note = 2'-O-methylcytidine
  modified_base 50: mod_base = OTHER; note = 2'-O-methyluridine
  modified_base 51: mod_base = OTHER; note = 2'-O-methyluridine
  modified_base 52: mod_base = OTHER; note = Arabinouridine
  modified_base 53: mod_base = OTHER; note = Arabinocytidine
  modified_base 54: mod_base = OTHER; note = Arabinocytidine
  modified_base 55: mod_base = OTHER; note = 2'-O-methyladenosine
  modified_base 56: mod_base = OTHER; note = 2'-O-methylcytidine
  modified_base 57: mod_base = OTHER; note = 2'-O-methyluridine
  modified_base 58: mod_base = OTHER; note = 2'-O-methyluridine
  modified_base 59: mod_base = OTHER; note = 2'-O-methylcytidine phosphorothioate
  modified_base 60: mod_base = OTHER; note = 2'-O-methylcytidine phosphorothioate
  modified_base 61: mod_base = OTHER; note = 2'-O-methyluridine phosphorothioate
  modified_base 62: mod_base = OTHER; note = 2'-O-methylguanosine phosphorothioate
  modified_base 63: mod_base = OTHER; note = 2'-O-methylcytidine

SEQ ID NO: 222 - DNA, 63 bp, synthetic construct; identical to SEQ ID NO: 62
  source 1..63: mol_type = other DNA; note = Description of Artificial Sequence: Synthetic oligonucleotide; note = Description of Combined DNA/RNA Molecule: Synthetic oligonucleotide
  modified_base 1: mod_base = OTHER; note = 2'-O-methylguanosine phosphorothioate
  modified_base 2: mod_base = OTHER; note = 2'-O-methyluridine phosphorothioate
  modified_base 3: mod_base = OTHER; note = 2'-O-methylguanosine phosphorothioate
  modified_base 4: mod_base = OTHER; note = 2'-O-methylguanosine phosphorothioate
  modified_base 5: mod_base = OTHER; note = 2'-O-methyladenosine
  modified_base 6: mod_base = OTHER; note = 2'-O-methyladenosine
  modified_base 7: mod_base = OTHER; note = 2'-O-methyluridine
  modified_base 8: mod_base = OTHER; note = 2'-O-methyladenosine
  modified_base 9: mod_base = OTHER; note = 2'-O-methylguanosine
  modified_base 10: mod_base = OTHER; note = 2'-O-methyluridine
  modified_base 11: mod_base = OTHER; note = 2'-O-methyladenosine
  modified_base 12: mod_base = OTHER; note = 2'-O-methyluridine
  modified_base 13: mod_base = OTHER; note = 2'-O-methyladenosine
  modified_base 14: mod_base = OTHER; note = 2'-O-methyladenosine
  modified_base 15: mod_base = OTHER; note = 2'-O-methylcytidine
  modified_base 16: mod_base = OTHER; note = 2'-O-methyladenosine
  modified_base 17: mod_base = OTHER; note = 2'-O-methyladenosine
  modified_base 18: mod_base = OTHER; note = 2'-O-methyluridine
  modified_base 19: mod_base = OTHER; note = 2'-O-methyladenosine
  modified_base 20: mod_base = OTHER; note = 2'-O-methyluridine
  modified_base 21: mod_base = OTHER; note = 2'-O-methylguanosine
  modified_base 22: mod_base = OTHER; note = 2'-O-methylcytidine
  modified_base 23: mod_base = OTHER; note = 2'-O-methyluridine
  modified_base 24: mod_base = OTHER; note = 2'-O-methyladenosine
  modified_base 25: mod_base = OTHER; note = 2'-O-methyladenosine
  modified_base 26: mod_base = OTHER; note = 2'-O-methyladenosine
  modified_base 27: mod_base = OTHER; note = 2'-O-methyluridine
  modified_base 28: mod_base = OTHER; note = 2'-O-methylguanosine
  modified_base 29: mod_base = OTHER; note = 2'-O-methyluridine
  modified_base 30: mod_base = OTHER; note = 2'-O-methyluridine
  modified_base 31: mod_base = OTHER; note = 2'-O-methylguanosine
  modified_base 32: mod_base = OTHER; note = 2'-O-methyluridine
  modified_base 33: mod_base = OTHER; note = 2'-O-methyluridine
  modified_base 34: mod_base = OTHER; note = 2'-O-methyladenosine
  modified_base 35: mod_base = OTHER; note = 2'-O-methyluridine
  modified_base 36: mod_base = OTHER; note = 2'-O-methyladenosine
  modified_base 37: mod_base = OTHER; note = 2'-O-methylguanosine
  modified_base 38: mod_base = OTHER; note = 2'-O-methyluridine
  modified_base 39: mod_base = OTHER; note = 2'-O-methyladenosine
  modified_base 40: mod_base = OTHER; note = 2'-O-methyluridine
  modified_base 41: mod_base = OTHER; note = 2'-O-methylcytidine
  modified_base 42: mod_base = OTHER; note = 2'-O-methylcytidine
  modified_base 43: mod_base = OTHER; note = 2'-O-methylcytidine
  modified_base 44: mod_base = OTHER; note = 2'-O-methyladenosine
  modified_base 45: mod_base = OTHER; note = 2'-O-methylcytidine
  modified_base 46: mod_base = OTHER; note = 2'-O-methylcytidine
  modified_base 47: mod_base = OTHER; note = 2'-O-methyladenosine
  modified_base 48: mod_base = OTHER; note = 2'-O-methylguanosine
  modified_base 49: mod_base = OTHER; note = 2'-O-methylcytidine
  modified_base 50: mod_base = OTHER; note = 2'-O-methyluridine
  modified_base 51: mod_base = OTHER; note = 2'-O-methyluridine
  modified_base 52: mod_base = OTHER; note = 2'-OMe-arabinouridine
  modified_base 55: mod_base = OTHER; note = 2'-O-methyladenosine
  modified_base 56: mod_base = OTHER; note = 2'-O-methylcytidine
  modified_base 57: mod_base = OTHER; note = 2'-O-methyluridine
  modified_base 58: mod_base = OTHER; note = 2'-O-methyluridine
  modified_base 59: mod_base = OTHER; note = 2'-O-methylcytidine phosphorothioate
  modified_base 60: mod_base = OTHER; note = 2'-O-methylcytidine phosphorothioate
  modified_base 61: mod_base = OTHER; note = 2'-O-methyluridine phosphorothioate
  modified_base 62: mod_base = OTHER; note = 2'-O-methylguanosine phosphorothioate
  modified_base 63: mod_base = OTHER; note = 2'-O-methylcytidine
  misc_feature 1..52: note = RNA
  misc_feature 53..54: note = DNA
  misc_feature 55..63: note = RNA

SEQ ID NO: 223 - DNA, 63 bp, synthetic construct; identical to SEQ ID NO: 62
  source 1..63: mol_type = other DNA; note = Description of Artificial Sequence: Synthetic oligonucleotide; note = Description of Combined DNA/RNA Molecule: Synthetic oligonucleotide
  modified_base 1: mod_base = OTHER; note = 2'-O-methylguanosine phosphorothioate
  modified_base 2: mod_base = OTHER; note = 2'-O-methyluridine phosphorothioate
  modified_base 3: mod_base = OTHER; note = 2'-O-methylguanosine phosphorothioate
  modified_base 4: mod_base = OTHER; note = 2'-O-methylguanosine phosphorothioate
  modified_base 5: mod_base = OTHER; note = 2'-O-methyladenosine
  modified_base 6: mod_base = OTHER; note = 2'-O-methyladenosine
  modified_base 7: mod_base = OTHER; note = 2'-O-methyluridine
  modified_base 8: mod_base = OTHER; note = 2'-O-methyladenosine
  modified_base 9: mod_base = OTHER; note = 2'-O-methylguanosine
  modified_base 10: mod_base = OTHER; note = 2'-O-methyluridine
  modified_base 11: mod_base = OTHER; note = 2'-O-methyladenosine
  modified_base 12: mod_base = OTHER; note = 2'-O-methyluridine
  modified_base 13: mod_base = OTHER; note = 2'-O-methyladenosine
  modified_base 14: mod_base = OTHER; note = 2'-O-methyladenosine
  modified_base 15: mod_base = OTHER; note = 2'-O-methylcytidine
  modified_base 16: mod_base = OTHER; note = 2'-O-methyladenosine
  modified_base 17: mod_base = OTHER; note = 2'-O-methyladenosine
  modified_base 18: mod_base = OTHER; note = 2'-O-methyluridine
  modified_base 19: mod_base = OTHER; note = 2'-O-methyladenosine
  modified_base 20: mod_base = OTHER; note = 2'-O-methyluridine
  modified_base 21: mod_base = OTHER; note = 2'-O-methylguanosine
  modified_base 22: mod_base = OTHER; note = 2'-O-methylcytidine
  modified_base 23: mod_base = OTHER; note = 2'-O-methyluridine
  modified_base 24: mod_base = OTHER; note = 2'-O-methyladenosine
  modified_base 25: mod_base = OTHER; note = 2'-O-methyladenosine
  modified_base 26: mod_base = OTHER; note = 2'-O-methyladenosine
  modified_base 27: mod_base = OTHER; note = 2'-O-methyluridine
  modified_base 28: mod_base = OTHER; note = 2'-O-methylguanosine
  modified_base 29: mod_base = OTHER; note = 2'-O-methyluridine
  modified_base 30: mod_base = OTHER; note = 2'-O-methyluridine
  modified_base 31: mod_base = OTHER; note = 2'-O-methylguanosine
  modified_base 32: mod_base = OTHER; note = 2'-O-methyluridine
  modified_base 33: mod_base = OTHER; note = 2'-O-methyluridine
  modified_base 34: mod_base = OTHER; note = 2'-O-methyladenosine
  modified_base 35: mod_base = OTHER; note = 2'-O-methyluridine
  modified_base 36: mod_base = OTHER; note = 2'-O-methyladenosine
  modified_base 37: mod_base = OTHER; note = 2'-O-methylguanosine
  modified_base 38: mod_base = OTHER; note = 2'-O-methyluridine
  modified_base 39: mod_base = OTHER; note = 2'-O-methyladenosine
  modified_base 40: mod_base = OTHER; note = 2'-O-methyluridine
  modified_base 41: mod_base = OTHER; note = 2'-O-methylcytidine
  modified_base 42: mod_base = OTHER; note = 2'-O-methylcytidine
  modified_base 43: mod_base = OTHER; note = 2'-O-methylcytidine
  modified_base 44: mod_base = OTHER; note = 2'-O-methyladenosine
  modified_base 45: mod_base = OTHER; note = 2'-O-methylcytidine
  modified_base 46: mod_base = OTHER; note = 2'-O-methylcytidine
  modified_base 47: mod_base = OTHER; note = 2'-O-methyladenosine
  modified_base 48: mod_base = OTHER; note = 2'-O-methylguanosine
  modified_base 49: mod_base = OTHER; note = 2'-O-methylcytidine
  modified_base 50: mod_base = OTHER; note = 2'-O-methyluridine
  modified_base 51: mod_base = OTHER; note = 2'-O-methyluridine
  modified_base 53: mod_base = OTHER; note = 2'-OMe-arabinocytidine
  modified_base 55: mod_base = OTHER; note = 2'-O-methyladenosine
  modified_base 56: mod_base = OTHER; note = 2'-O-methylcytidine
  modified_base 57: mod_base = OTHER; note = 2'-O-methyluridine
  modified_base 58: mod_base = OTHER; note = 2'-O-methyluridine
  modified_base 59: mod_base = OTHER; note = 2'-O-methylcytidine phosphorothioate
  modified_base 60: mod_base = OTHER; note = 2'-O-methylcytidine phosphorothioate
  modified_base 61: mod_base = OTHER; note = 2'-O-methyluridine phosphorothioate
  modified_base 62: mod_base = OTHER; note = 2'-O-methylguanosine phosphorothioate
  modified_base 63: mod_base = OTHER; note = 2'-O-methylcytidine
  misc_feature 1..51: note = RNA
  misc_feature 52: note = DNA
  misc_feature 53: note = RNA
  misc_feature 54: note = DNA
  misc_feature 55..63: note = RNA

SEQ ID NO: 224 - DNA, 63 bp, synthetic construct; identical to SEQ ID NO: 62
  source 1..63: mol_type = other DNA; note = Description of Artificial Sequence: Synthetic oligonucleotide; note = Description of Combined DNA/RNA Molecule: Synthetic oligonucleotide
  modified_base 1: mod_base = OTHER; note = 2'-O-methylguanosine phosphorothioate
  modified_base 2: mod_base = OTHER; note = 2'-O-methyluridine phosphorothioate
  modified_base 3: mod_base = OTHER; note = 2'-O-methylguanosine phosphorothioate
  modified_base 4: mod_base = OTHER; note = 2'-O-methylguanosine phosphorothioate
  modified_base 5: mod_base = OTHER; note = 2'-O-methyladenosine
  modified_base 6: mod_base = OTHER; note = 2'-O-methyladenosine
  modified_base 7: mod_base = OTHER; note = 2'-O-methyluridine
  modified_base 8: mod_base = OTHER; note = 2'-O-methyladenosine
  modified_base 9: mod_base = OTHER; note = 2'-O-methylguanosine
  modified_base 10: mod_base = OTHER; note = 2'-O-methyluridine
  modified_base 11: mod_base = OTHER; note = 2'-O-methyladenosine
  modified_base 12: mod_base = OTHER; note = 2'-O-methyluridine
  modified_base 13: mod_base = OTHER; note = 2'-O-methyladenosine
  modified_base 14: mod_base = OTHER; note = 2'-O-methyladenosine
  modified_base 15: mod_base = OTHER; note = 2'-O-methylcytidine
  modified_base 16: mod_base = OTHER; note = 2'-O-methyladenosine
  modified_base 17: mod_base = OTHER; note = 2'-O-methyladenosine
  modified_base 18: mod_base = OTHER; note = 2'-O-methyluridine
  modified_base 19: mod_base = OTHER; note = 2'-O-methyladenosine
  modified_base 20: mod_base = OTHER; note = 2'-O-methyluridine
  modified_base 21: mod_base = OTHER; note = 2'-O-methylguanosine
  modified_base 22: mod_base = OTHER; note = 2'-O-methylcytidine
  modified_base 23: mod_base = OTHER; note = 2'-O-methyluridine
  modified_base 24: mod_base = OTHER; note = 2'-O-methyladenosine
  modified_base 25: mod_base = OTHER; note = 2'-O-methyladenosine
  modified_base 26: mod_base = OTHER; note = 2'-O-methyladenosine
  modified_base 27: mod_base = OTHER; note = 2'-O-methyluridine
  modified_base 28: mod_base = OTHER; note = 2'-O-methylguanosine
  modified_base 29: mod_base = OTHER; note = 2'-O-methyluridine
  modified_base 30: mod_base = OTHER; note = 2'-O-methyluridine
  modified_base 31: mod_base = OTHER; note = 2'-O-methylguanosine
  modified_base 32: mod_base = OTHER; note = 2'-O-methyluridine
  modified_base 33: mod_base = OTHER; note = 2'-O-methyluridine
  modified_base 34: mod_base = OTHER; note = 2'-O-methyladenosine
  modified_base 35: mod_base = OTHER; note = 2'-O-methyluridine
  modified_base 36: mod_base = OTHER; note = 2'-O-methyladenosine
  modified_base 37: mod_base = OTHER; note = 2'-O-methylguanosine
  modified_base 38: mod_base = OTHER; note = 2'-O-methyluridine
  modified_base 39: mod_base = OTHER; note = 2'-O-methyladenosine
  modified_base 40: mod_base = OTHER; note = 2'-O-methyluridine
  modified_base 41: mod_base = OTHER; note = 2'-O-methylcytidine
  modified_base 42: mod_base = OTHER; note = 2'-O-methylcytidine
  modified_base 43: mod_base = OTHER; note = 2'-O-methylcytidine
  modified_base 44: mod_base = OTHER; note = 2'-O-methyladenosine
  modified_base 45: mod_base = OTHER; note = 2'-O-methylcytidine
  modified_base 46: mod_base = OTHER; note = 2'-O-methylcytidine
  modified_base 47: mod_base = OTHER; note = 2'-O-methyladenosine
  modified_base 48: mod_base = OTHER; note = 2'-O-methylguanosine
  modified_base 49: mod_base = OTHER; note = 2'-O-methylcytidine
  modified_base 50: mod_base = OTHER; note = 2'-O-methyluridine
  modified_base 51: mod_base = OTHER; note = 2'-O-methyluridine
  modified_base 54: mod_base = OTHER; note = 2'-OMe-arabinocytidine
  modified_base 55: mod_base = OTHER; note = 2'-O-methyladenosine
  modified_base 56: mod_base = OTHER; note = 2'-O-methylcytidine
  modified_base 57: mod_base = OTHER; note = 2'-O-methyluridine
  modified_base 58: mod_base = OTHER; note = 2'-O-methyluridine
  modified_base 59: mod_base = OTHER; note = 2'-O-methylcytidine phosphorothioate
  modified_base 60: mod_base = OTHER; note = 2'-O-methylcytidine phosphorothioate
  modified_base 61: mod_base = OTHER; note = 2'-O-methyluridine phosphorothioate
  modified_base 62: mod_base = OTHER; note = 2'-O-methylguanosine phosphorothioate
  modified_base 63: mod_base = OTHER; note = 2'-O-methylcytidine
  misc_feature 1..51: note = RNA
  misc_feature 52..53: note = DNA
  misc_feature 54..63: note = RNA

SEQ ID NO: 225 - DNA, 63 bp, synthetic construct; identical to SEQ ID NO: 62
  source 1..63: mol_type = other DNA; note = Description of Artificial Sequence: Synthetic oligonucleotide; note = Description of Combined DNA/RNA Molecule: Synthetic oligonucleotide
  modified_base 1: mod_base = OTHER; note = 2'-O-methylguanosine phosphorothioate
  modified_base 2: mod_base = OTHER; note = 2'-O-methyluridine phosphorothioate
  modified_base 3: mod_base = OTHER; note = 2'-O-methylguanosine phosphorothioate
  modified_base 4: mod_base = OTHER; note = 2'-O-methylguanosine phosphorothioate
  modified_base 5: mod_base = OTHER; note = 2'-O-methyladenosine
  modified_base 6: mod_base = OTHER; note = 2'-O-methyladenosine
  modified_base 7: mod_base = OTHER; note = 2'-O-methyluridine
  modified_base 8: mod_base = OTHER; note = 2'-O-methyladenosine
  modified_base 9: mod_base = OTHER; note = 2'-O-methylguanosine
  modified_base 10: mod_base = OTHER; note = 2'-O-methyluridine
  modified_base 11: mod_base = OTHER; note = 2'-O-methyladenosine
  modified_base 12: mod_base = OTHER; note = 2'-O-methyluridine
  modified_base 13: mod_base = OTHER; note = 2'-O-methyladenosine
  modified_base 14: mod_base = OTHER; note = 2'-O-methyladenosine
  modified_base 15: mod_base = OTHER; note = 2'-O-methylcytidine
  modified_base 16: mod_base = OTHER; note = 2'-O-methyladenosine
  modified_base 17: mod_base = OTHER; note = 2'-O-methyladenosine
  modified_base 18: mod_base = OTHER; note = 2'-O-methyluridine
  modified_base 19: mod_base = OTHER; note = 2'-O-methyladenosine
  modified_base 20: mod_base = OTHER; note = 2'-O-methyluridine
  modified_base 21: mod_base = OTHER; note = 2'-O-methylguanosine
  modified_base 22: mod_base = OTHER; note = 2'-O-methylcytidine
  modified_base 23: mod_base = OTHER; note = 2'-O-methyluridine
  modified_base 24: mod_base = OTHER; note = 2'-O-methyladenosine
  modified_base 25: mod_base = OTHER; note = 2'-O-methyladenosine
  modified_base 26: mod_base = OTHER; note = 2'-O-methyladenosine
  modified_base 27: mod_base = OTHER; note = 2'-O-methyluridine
  modified_base 28: mod_base = OTHER; note = 2'-O-methylguanosine
  modified_base 29: mod_base = OTHER; note = 2'-O-methyluridine
  modified_base 30: mod_base = OTHER; note = 2'-O-methyluridine
  modified_base 31: mod_base = OTHER; note = 2'-O-methylguanosine
  modified_base 32: mod_base = OTHER; note = 2'-O-methyluridine
  modified_base 33: mod_base = OTHER; note = 2'-O-methyluridine
  modified_base 34: mod_base = OTHER; note = 2'-O-methyladenosine
  modified_base 35: mod_base = OTHER; note = 2'-O-methyluridine
  modified_base 36: mod_base = OTHER; note = 2'-O-methyladenosine
  modified_base 37: mod_base = OTHER; note = 2'-O-methylguanosine
  modified_base 38: mod_base = OTHER; note = 2'-O-methyluridine
  modified_base 39: mod_base = OTHER; note = 2'-O-methyladenosine
  modified_base 40: mod_base = OTHER; note = 2'-O-methyluridine
  modified_base 41: mod_base = OTHER; note = 2'-O-methylcytidine
  modified_base 42: mod_base = OTHER; note = 2'-O-methylcytidine
  modified_base 43: mod_base = OTHER; note = 2'-O-methylcytidine
  modified_base 44: mod_base = OTHER; note = 2'-O-methyladenosine
  modified_base 45: mod_base = OTHER; note = 2'-O-methylcytidine
  modified_base 46: mod_base = OTHER; note = 2'-O-methylcytidine
  modified_base 47: mod_base = OTHER; note = 2'-O-methyladenosine
  modified_base 48: mod_base = OTHER; note = 2'-O-methylguanosine
  modified_base 49: mod_base = OTHER; note = 2'-O-methylcytidine
  modified_base 50: mod_base = OTHER; note = 2'-O-methyluridine
  modified_base 51: mod_base = OTHER; note = 2'-O-methyluridine
  modified_base 53: mod_base = OTHER; note = Alpha-anomer cytidine
  modified_base 55: mod_base = OTHER; note = 2'-O-methyladenosine
  modified_base 56: mod_base = OTHER; note = 2'-O-methylcytidine
  modified_base 57: mod_base = OTHER; note = 2'-O-methyluridine
  modified_base 58: mod_base = OTHER; note = 2'-O-methyluridine
  modified_base 59: mod_base = OTHER; note = 2'-O-methylcytidine phosphorothioate
  modified_base 60: mod_base = OTHER; note = 2'-O-methylcytidine phosphorothioate
  modified_base 61: mod_base = OTHER; note = 2'-O-methyluridine phosphorothioate
  modified_base 62: mod_base = OTHER; note = 2'-O-methylguanosine phosphorothioate
  modified_base 63: mod_base = OTHER; note = 2'-O-methylcytidine
  misc_feature 1..51: note = RNA
  misc_feature 52..54: note = DNA
  misc_feature 55..63: note = RNA

SEQ ID NO: 226 - DNA, 63 bp, synthetic construct
  source 1..63: mol_type = other DNA; note = Description of Artificial Sequence: Synthetic oligonucleotide; note = Description of Combined DNA/RNA Molecule: Synthetic oligonucleotide
  modified_base 1: mod_base = OTHER; note = 2'-O-methylguanosine phosphorothioate
  modified_base 2: mod_base = OTHER; note = 2'-O-methyluridine phosphorothioate
  modified_base 3: mod_base = OTHER; note = 2'-O-methylguanosine phosphorothioate
  modified_base 4: mod_base = OTHER; note = 2'-O-methylguanosine phosphorothioate
  modified_base 5: mod_base = OTHER; note = 2'-O-methyladenosine
  modified_base 6: mod_base = OTHER; note = 2'-O-methyladenosine
  modified_base 7: mod_base = OTHER; note = 2'-O-methyluridine
  modified_base 8: mod_base = OTHER; note = 2'-O-methyladenosine
  modified_base 9: mod_base = OTHER; note = 2'-O-methylguanosine
  modified_base 10: mod_base = OTHER; note = 2'-O-methyluridine
  modified_base 11: mod_base = OTHER; note = 2'-O-methyladenosine
  modified_base 12: mod_base = OTHER; note = 2'-O-methyluridine
  modified_base 13: mod_base = OTHER; note = 2'-O-methyladenosine
  modified_base 14: mod_base = OTHER; note = 2'-O-methyladenosine
  modified_base 15: mod_base = OTHER; note = 2'-O-methylcytidine
  modified_base 16: mod_base = OTHER; note = 2'-O-methyladenosine
  modified_base 17: mod_base = OTHER; note = 2'-O-methyladenosine
  modified_base 18: mod_base = OTHER; note = 2'-O-methyluridine
  modified_base 19: mod_base = OTHER; note = 2'-O-methyladenosine
  modified_base 20: mod_base = OTHER; note = 2'-O-methyluridine
  modified_base 21: mod_base = OTHER; note = 2'-O-methylguanosine
  modified_base 22: mod_base = OTHER; note = 2'-O-methylcytidine
  modified_base 23: mod_base = OTHER; note = 2'-O-methyluridine
  modified_base 24: mod_base = OTHER; note = 2'-O-methyladenosine
  modified_base 25: mod_base = OTHER; note = 2'-O-methyladenosine
  modified_base 26: mod_base = OTHER; note = 2'-O-methyladenosine
  modified_base 27: mod_base = OTHER; note = 2'-O-methyluridine
  modified_base 28: mod_base = OTHER; note = 2'-O-methylguanosine
  modified_base 29: mod_base = OTHER; note = 2'-O-methyluridine
  modified_base 30: mod_base = OTHER; note = 2'-O-methyluridine
  modified_base 31: mod_base = OTHER; note = 2'-O-methylguanosine
  modified_base 32: mod_base = OTHER; note = 2'-O-methyluridine
  modified_base 33: mod_base = OTHER; note = 2'-O-methyluridine
  modified_base 34: mod_base = OTHER; note = 2'-O-methyladenosine
  modified_base 35: mod_base = OTHER; note = 2'-O-methyluridine
  modified_base 36: mod_base = OTHER; note = 2'-O-methyladenosine
  modified_base 37: mod_base = OTHER; note = 2'-O-methylguanosine
  modified_base 38: mod_base = OTHER; note = 2'-O-methyluridine
  modified_base 39: mod_base = OTHER; note = 2'-O-methyladenosine
  modified_base 40: mod_base = OTHER; note = 2'-O-methyluridine
  modified_base 41: mod_base = OTHER; note = 2'-O-methylcytidine
  modified_base 42: mod_base = OTHER; note = 2'-O-methylcytidine
  modified_base 43: mod_base = OTHER; note = 2'-O-methylcytidine
  modified_base 44: mod_base = OTHER; note = 2'-O-methyladenosine
  modified_base 45: mod_base = OTHER; note = 2'-O-methylcytidine
  modified_base 46: mod_base = OTHER; note = 2'-O-methylcytidine
  modified_base 47: mod_base = OTHER; note = 2'-O-methyladenosine
  modified_base 48: mod_base = OTHER; note = 2'-O-methylguanosine
  modified_base 49: mod_base = OTHER; note = 2'-O-methylcytidine
  modified_base 50: mod_base = OTHER; note = 2'-O-methyluridine
  modified_base 51: mod_base = OTHER; note = 2'-O-methyluridine
  modified_base 53: mod_base = OTHER; note = Abasic nucleotide
  modified_base 55: mod_base = OTHER; note = 2'-O-methyladenosine
  modified_base 56: mod_base = OTHER; note = 2'-O-methylcytidine
  modified_base 57: mod_base = OTHER; note = 2'-O-methyluridine
  modified_base 58: mod_base = OTHER; note = 2'-O-methyluridine
  modified_base 59: mod_base = OTHER; note = 2'-O-methylcytidine phosphorothioate
  modified_base 60: mod_base = OTHER; note = 2'-O-methylcytidine phosphorothioate
  modified_base 61: mod_base = OTHER; note = 2'-O-methyluridine phosphorothioate
  modified_base 62: mod_base = OTHER; note = 2'-O-methylguanosine phosphorothioate
  modified_base 63: mod_base = OTHER; note = 2'-O-methylcytidine
  misc_feature 1..51: note = RNA
  misc_feature 52..54: note = DNA
  misc_feature 55..63: note = RNA
gtggaatagtataacaatatgctaaatgttgttatagtatcccaccagctttncacttcctgc

SEQ ID NO: 227 - DNA, 63 bp, synthetic construct; identical to SEQ ID NO: 226
  source 1..63: mol_type = other DNA; note = Description of Artificial Sequence: Synthetic oligonucleotide; note = Description of Combined DNA/RNA Molecule: Synthetic oligonucleotide
  modified_base 1: mod_base = OTHER; note = 2'-O-methylguanosine phosphorothioate
  modified_base 2: mod_base = OTHER; note = 2'-O-methyluridine phosphorothioate
  modified_base 3: mod_base = OTHER; note = 2'-O-methylguanosine phosphorothioate
  modified_base 4: mod_base = OTHER; note = 2'-O-methylguanosine phosphorothioate
  modified_base 5: mod_base = OTHER; note = 2'-O-methyladenosine
  modified_base 6: mod_base = OTHER; note = 2'-O-methyladenosine
  modified_base 7: mod_base = OTHER; note = 2'-O-methyluridine
  modified_base 8: mod_base = OTHER; note = 2'-O-methyladenosine
  modified_base 9: mod_base = OTHER; note = 2'-O-methylguanosine
  modified_base 10: mod_base = OTHER; note = 2'-O-methyluridine
  modified_base 11: mod_base = OTHER; note = 2'-O-methyladenosine
  modified_base 12: mod_base = OTHER; note = 2'-O-methyluridine
  modified_base 13: mod_base = OTHER; note = 2'-O-methyladenosine
  modified_base 14: mod_base = OTHER; note = 2'-O-methyladenosine
  modified_base 15: mod_base = OTHER; note = 2'-O-methylcytidine
  modified_base 16: mod_base = OTHER; note = 2'-O-methyladenosine
  modified_base 17: mod_base = OTHER; note = 2'-O-methyladenosine
  modified_base 18: mod_base = OTHER; note = 2'-O-methyluridine
  modified_base 19: mod_base = OTHER; note = 2'-O-methyladenosine
  modified_base 20: mod_base = OTHER; note = 2'-O-methyluridine
  modified_base 21: mod_base = OTHER; note = 2'-O-methylguanosine
  modified_base 22: mod_base = OTHER; note = 2'-O-methylcytidine
  modified_base 23: mod_base = OTHER; note = 2'-O-methyluridine
  modified_base 24: mod_base = OTHER; note = 2'-O-methyladenosine
  modified_base 25: mod_base = OTHER; note = 2'-O-methyladenosine
  modified_base 26: mod_base = OTHER; note = 2'-O-methyladenosine
  modified_base 27: mod_base = OTHER; note = 2'-O-methyluridine
  modified_base 28: mod_base = OTHER; note = 2'-O-methylguanosine
  modified_base 29: mod_base = OTHER; note = 2'-O-methyluridine
  modified_base 30: mod_base = OTHER; note = 2'-O-methyluridine
  modified_base 31: mod_base = OTHER; note = 2'-O-methylguanosine
  modified_base 32: mod_base = OTHER; note = 2'-O-methyluridine
  modified_base 33: mod_base = OTHER; note = 2'-O-methyluridine
  modified_base 34: mod_base = OTHER; note = 2'-O-methyladenosine
  modified_base 35: mod_base = OTHER; note = 2'-O-methyluridine
  modified_base 36: mod_base = OTHER; note = 2'-O-methyladenosine
  modified_base 37: mod_base = OTHER; note = 2'-O-methylguanosine
  modified_base 38: mod_base = OTHER; note = 2'-O-methyluridine
  modified_base 39: mod_base = OTHER; note = 2'-O-methyladenosine
  modified_base 40: mod_base = OTHER; note = 2'-O-methyluridine
  modified_base 41: mod_base = OTHER; note = 2'-O-methylcytidine
  modified_base 42: mod_base = OTHER; note = 2'-O-methylcytidine
  modified_base 43: mod_base = OTHER; note = 2'-O-methylcytidine
  modified_base 44: mod_base = OTHER; note = 2'-O-methyladenosine
  modified_base 45: mod_base = OTHER; note = 2'-O-methylcytidine
  modified_base 46: mod_base = OTHER; note = 2'-O-methylcytidine
  modified_base 47: mod_base = OTHER; note = 2'-O-methyladenosine
  modified_base 48: mod_base = OTHER; note = 2'-O-methylguanosine
  modified_base 49: mod_base = OTHER; note = 2'-O-methylcytidine
  modified_base 50: mod_base = OTHER; note = 2'-O-methyluridine
  modified_base 51: mod_base = OTHER; note = 2'-O-methyluridine
  modified_base 53: mod_base = OTHER; note = Abasic nucleotide
  modified_base 55: mod_base = OTHER; note = 2'-O-methyladenosine
  modified_base 56: mod_base = OTHER; note = 2'-O-methylcytidine
  modified_base 57: mod_base = OTHER; note = 2'-O-methyluridine
  modified_base 58: mod_base = OTHER; note = 2'-O-methyluridine
  modified_base 59: mod_base = OTHER; note = 2'-O-methylcytidine phosphorothioate
  modified_base 60: mod_base = OTHER; note = 2'-O-methylcytidine phosphorothioate
  modified_base 61: mod_base = OTHER; note = 2'-O-methyluridine phosphorothioate
  modified_base 62: mod_base = OTHER; note = 2'-O-methylguanosine phosphorothioate
  modified_base 63: mod_base = OTHER; note = 2'-O-methylcytidine
  misc_feature 1..51: note = RNA
  misc_feature 52: note = DNA
  misc_feature 53: note = RNA
  misc_feature 54: note = DNA
  misc_feature 55..63: note = RNA

SEQ ID NO: 228 - DNA, 63 bp, synthetic construct; identical to SEQ ID NO: 226
  source 1..63: mol_type = other DNA; note = Description of Artificial Sequence: Synthetic oligonucleotide; note = Description of Combined DNA/RNA Molecule: Synthetic oligonucleotide
  modified_base 1: mod_base = OTHER; note = 2'-O-methylguanosine phosphorothioate
  modified_base 2: mod_base = OTHER; note = 2'-O-methyluridine phosphorothioate
  modified_base 3: mod_base = OTHER; note = 2'-O-methylguanosine phosphorothioate
  modified_base 4: mod_base = OTHER; note = 2'-O-methylguanosine phosphorothioate
  modified_base 5: mod_base = OTHER; note = 2'-O-methyladenosine
  modified_base 6: mod_base = OTHER; note = 2'-O-methyladenosine
  modified_base 7: mod_base = OTHER; note = 2'-O-methyluridine
  modified_base 8: mod_base = OTHER; note = 2'-O-methyladenosine
  modified_base 9: mod_base = OTHER; note = 2'-O-methylguanosine
  modified_base 10: mod_base = OTHER; note = 2'-O-methyluridine
  modified_base 11: mod_base = OTHER; note = 2'-O-methyladenosine
  modified_base 12: mod_base = OTHER; note = 2'-O-methyluridine
  modified_base 13: mod_base = OTHER; note = 2'-O-methyladenosine
  modified_base 14: mod_base = OTHER; note = 2'-O-methyladenosine
  modified_base 15: mod_base = OTHER; note = 2'-O-methylcytidine
  modified_base 16: mod_base = OTHER; note = 2'-O-methyladenosine
  modified_base 17: mod_base = OTHER; note = 2'-O-methyladenosine
  modified_base 18: mod_base = OTHER; note = 2'-O-methyluridine
  modified_base 19: mod_base = OTHER; note = 2'-O-methyladenosine
  modified_base 20: mod_base = OTHER; note = 2'-O-methyluridine
  modified_base 21: mod_base = OTHER; note = 2'-O-methylguanosine
  modified_base 22: mod_base = OTHER; note = 2'-O-methylcytidine
  modified_base 23: mod_base = OTHER; note = 2'-O-methyluridine
  modified_base 24: mod_base = OTHER; note = 2'-O-methyladenosine
  modified_base 25: mod_base = OTHER; note = 2'-O-methyladenosine
  modified_base 26: mod_base = OTHER; note = 2'-O-methyladenosine
  modified_base 27: mod_base = OTHER; note = 2'-O-methyluridine
  modified_base 28: mod_base = OTHER; note = 2'-O-methylguanosine
  modified_base 29: mod_base = OTHER; note = 2'-O-methyluridine
  modified_base 30: mod_base = OTHER; note = 2'-O-methyluridine
  modified_base 31: mod_base = OTHER; note = 2'-O-methylguanosine
  modified_base 32: mod_base = OTHER; note = 2'-O-methyluridine
  modified_base 33: mod_base = OTHER; note = 2'-O-methyluridine
  modified_base 34: mod_base = OTHER; note = 2'-O-methyladenosine
  modified_base 35: mod_base = OTHER; note = 2'-O-methyluridine
  modified_base 36: mod_base = OTHER; note = 2'-O-methyladenosine
  modified_base 37: mod_base = OTHER; note = 2'-O-methylguanosine
  modified_base 38: mod_base = OTHER; note = 2'-O-methyluridine
  modified_base 39: mod_base = OTHER; note = 2'-O-methyladenosine
  modified_base 40: mod_base = OTHER; note = 2'-O-methyluridine
  modified_base 41: mod_base = OTHER; note = 2'-O-methylcytidine
  modified_base 42: mod_base = OTHER; note = 2'-O-methylcytidine
  modified_base 43: mod_base = OTHER; note = 2'-O-methylcytidine
  modified_base 44: mod_base = OTHER; note = 2'-O-methyladenosine
  modified_base 45: mod_base = OTHER; note = 2'-O-methylcytidine
  modified_base 46: mod_base = OTHER; note = 2'-O-methylcytidine
  modified_base 47: mod_base = OTHER; note = 2'-O-methyladenosine
  modified_base 48: mod_base = OTHER; note = 2'-O-methylguanosine
  modified_base 49: mod_base = OTHER; note = 2'-O-methylcytidine
  modified_base 50: mod_base = OTHER; note = 2'-O-methyluridine
  modified_base 51: mod_base = OTHER; note = 2'-O-methyluridine
  modified_base 53: mod_base = OTHER; note = 2'-OMe-Abasic nucleotide
  modified_base 55: mod_base = OTHER; note = 2'-O-methyladenosine
  modified_base 56: mod_base = OTHER; note = 2'-O-methylcytidine
  modified_base 57: mod_base = OTHER; note = 2'-O-methyluridine
  modified_base 58: mod_base = OTHER; note = 2'-O-methyluridine
  modified_base 59: mod_base = OTHER; note = 2'-O-methylcytidine phosphorothioate
  modified_base 60: mod_base = OTHER; note = 2'-O-methylcytidine phosphorothioate
  modified_base 61: mod_base = OTHER; note = 2'-O-methyluridine phosphorothioate
  modified_base 62: mod_base = OTHER; note = 2'-O-methylguanosine phosphorothioate
  modified_base 63: mod_base = OTHER; note = 2'-O-methylcytidine
  misc_feature 1..51: note = RNA
  misc_feature 52: note = DNA
  misc_feature 53: note = RNA
  misc_feature 54: note = DNA
  misc_feature 55..63: note = RNA

SEQ ID NO: 229 - DNA, 63 bp, synthetic construct; identical to SEQ ID NO: 62
  source 1..63: mol_type = other DNA; note = Description of Artificial Sequence: Synthetic oligonucleotide; note = Description of Combined DNA/RNA Molecule: Synthetic oligonucleotide
  modified_base 1: mod_base = OTHER; note = 2'-O-methylguanosine phosphorothioate
  modified_base 2: mod_base = OTHER; note = 2'-O-methyluridine phosphorothioate
  modified_base 3: mod_base = OTHER; note = 2'-O-methylguanosine phosphorothioate
  modified_base 4: mod_base = OTHER; note = 2'-O-methylguanosine phosphorothioate
  modified_base 5: mod_base = OTHER; note = 2'-O-methyladenosine
  modified_base 6: mod_base = OTHER; note = 2'-O-methyladenosine
  modified_base 7: mod_base = OTHER; note = 2'-O-methyluridine
  modified_base 8: mod_base = OTHER; note = 2'-O-methyladenosine
  modified_base 9: mod_base = OTHER; note = 2'-O-methylguanosine
  modified_base 10: mod_base = OTHER; note = 2'-O-methyluridine
  modified_base 11: mod_base = OTHER; note = 2'-O-methyladenosine
  modified_base 12: mod_base = OTHER; note = 2'-O-methyluridine
  modified_base 13: mod_base = OTHER; note = 2'-O-methyladenosine
  modified_base 14: mod_base = OTHER; note = 2'-O-methyladenosine
  modified_base 15: mod_base = OTHER; note = 2'-O-methylcytidine
  modified_base 16: mod_base = OTHER; note = 2'-O-methyladenosine
  modified_base 17: mod_base = OTHER; note = 2'-O-methyladenosine
  modified_base 18: mod_base = OTHER; note = 2'-O-methyluridine
  modified_base 19: mod_base = OTHER; note = 2'-O-methyladenosine
  modified_base 20: mod_base = OTHER; note = 2'-O-methyluridine
  modified_base 21: mod_base = OTHER; note = 2'-O-methylguanosine
  modified_base 22: mod_base = OTHER; note = 2'-O-methylcytidine
  modified_base 23: mod_base = OTHER; note = 2'-O-methyluridine
  modified_base 24: mod_base = OTHER; note = 2'-O-methyladenosine
  modified_base 25: mod_base = OTHER; note = 2'-O-methyladenosine
  modified_base 26: mod_base = OTHER; note = 2'-O-methyladenosine
  modified_base 27: mod_base = OTHER; note = 2'-O-methyluridine
  modified_base 28: mod_base = OTHER; note = 2'-O-methylguanosine
  modified_base 29: mod_base = OTHER; note = 2'-O-methyluridine
  modified_base 30: mod_base = OTHER; note = 2'-O-methyluridine
  modified_base 31: mod_base = OTHER; note = 2'-O-methylguanosine
  modified_base 32: mod_base = OTHER; note = 2'-O-methyluridine
  modified_base 33: mod_base = OTHER; note = 2'-O-methyluridine
  modified_base 34: mod_base = OTHER; note = 2'-O-methyladenosine
  modified_base 35: mod_base = OTHER; note = 2'-O-methyluridine
  modified_base 36: mod_base = OTHER; note = 2'-O-methyladenosine
  modified_base 37: mod_base = OTHER; note = 2'-O-methylguanosine
  modified_base 38: mod_base = OTHER; note = 2'-O-methyluridine
  modified_base 39: mod_base = OTHER; note = 2'-O-methyladenosine
  modified_base 40: mod_base = OTHER; note = 2'-O-methyluridine
  modified_base 41: mod_base = OTHER; note = 2'-O-methylcytidine
  modified_base 42: mod_base = OTHER; note = 2'-O-methylcytidine
  modified_base 43: mod_base = OTHER; note = 2'-O-methylcytidine
  modified_base 44: mod_base = OTHER; note = 2'-O-methyladenosine
  modified_base 45: mod_base = OTHER; note = 2'-O-methylcytidine
  modified_base 46: mod_base = OTHER; note = 2'-O-methylcytidine
  modified_base 47: mod_base = OTHER; note = 2'-O-methyladenosine
  modified_base 48: mod_base = OTHER; note = 2'-O-methylguanosine
  modified_base 49: mod_base = OTHER; note = 2'-O-methylcytidine
  modified_base 50: mod_base = OTHER; note = 2'-O-methyluridine
  modified_base 51: mod_base = OTHER; note = 2'-O-methyluridine
  modified_base 52: mod_base = OTHER; note = (S)-glycol thymidine
  modified_base 55: mod_base = OTHER; note = 2'-O-methyladenosine
  modified_base 56: mod_base = OTHER; note = 2'-O-methylcytidine
  modified_base 57: mod_base = OTHER; note = 2'-O-methyluridine
  modified_base 58: mod_base = OTHER; note = 2'-O-methyluridine
  modified_base 59: mod_base = OTHER; note = 2'-O-methylcytidine phosphorothioate
  modified_base 60: mod_base = OTHER; note = 2'-O-methylcytidine phosphorothioate
  modified_base 61: mod_base = OTHER; note = 2'-O-methyluridine phosphorothioate
  modified_base 62: mod_base = OTHER; note = 2'-O-methylguanosine phosphorothioate
  modified_base 63: mod_base = OTHER; note = 2'-O-methylcytidine
  misc_feature 1..52: note = RNA
  misc_feature 53..54: note = DNA
  misc_feature 55..63: note = RNA

SEQ ID NO: 230 - DNA, 63 bp, synthetic construct; identical to SEQ ID NO: 62
  source 1..63: mol_type = other DNA; note = Description of Artificial Sequence: Synthetic oligonucleotide; note = Description of Combined DNA/RNA Molecule: Synthetic oligonucleotide
  modified_base 1: mod_base = OTHER; note = 2'-O-methylguanosine phosphorothioate
  modified_base 2: mod_base = OTHER; note = 2'-O-methyluridine phosphorothioate
  modified_base 3: mod_base = OTHER; note = 2'-O-methylguanosine phosphorothioate
  modified_base 4: mod_base = OTHER; note = 2'-O-methylguanosine phosphorothioate
  modified_base 5: mod_base = OTHER; note = 2'-O-methyladenosine
  modified_base 6: mod_base = OTHER; note = 2'-O-methyladenosine
  modified_base 7: mod_base = OTHER; note = 2'-O-methyluridine
  modified_base 8: mod_base = OTHER; note = 2'-O-methyladenosine
  modified_base 9: mod_base = OTHER; note = 2'-O-methylguanosine
  modified_base 10: mod_base = OTHER; note = 2'-O-methyluridine
  modified_base 11: mod_base = OTHER; note = 2'-O-methyladenosine
  modified_base 12: mod_base = OTHER; note = 2'-O-methyluridine
  modified_base 13: mod_base = OTHER; note = 2'-O-methyladenosine
  modified_base 14: mod_base = OTHER; note = 2'-O-methyladenosine
  modified_base 15: mod_base = OTHER; note = 2'-O-methylcytidine
  modified_base 16: mod_base = OTHER; note = 2'-O-methyladenosine
  modified_base 17: mod_base = OTHER; note = 2'-O-methyladenosine
  modified_base 18: mod_base = OTHER; note = 2'-O-methyluridine
  modified_base 19: mod_base = OTHER; note = 2'-O-methyladenosine
  modified_base 20: mod_base = OTHER; note = 2'-O-methyluridine
  modified_base 21: mod_base = OTHER; note = 2'-O-methylguanosine
  modified_base 22: mod_base = OTHER; note = 2'-O-methylcytidine
  modified_base 23: mod_base = OTHER; note = 2'-O-methyluridine
  modified_base 24: mod_base = OTHER; note = 2'-O-methyladenosine
  modified_base 25: mod_base = OTHER; note = 2'-O-methyladenosine
  modified_base 26: mod_base = OTHER; note = 2'-O-methyladenosine
  modified_base 27: mod_base = OTHER; note = 2'-O-methyluridine
  modified_base 28: mod_base = OTHER; note = 2'-O-methylguanosine
  modified_base 29: mod_base = OTHER; note = 2'-O-methyluridine
  modified_base 30: mod_base = OTHER; note = 2'-O-methyluridine
  modified_base 31: mod_base = OTHER; note = 2'-O-methylguanosine
  modified_base 32: mod_base = OTHER; note = 2'-O-methyluridine
  modified_base 33: mod_base = OTHER; note = 2'-O-methyluridine
  modified_base 34: mod_base = OTHER; note = 2'-O-methyladenosine
  modified_base 35: mod_base = OTHER; note = 2'-O-methyluridine
  modified_base 36: mod_base = OTHER; note = 2'-O-methyladenosine
  modified_base 37: mod_base = OTHER; note = 2'-O-methylguanosine
  modified_base 38: mod_base = OTHER; note = 2'-O-methyluridine
  modified_base 39: mod_base = OTHER; note = 2'-O-methyladenosine
  modified_base 40: mod_base = OTHER; note = 2'-O-methyluridine
  modified_base 41: mod_base = OTHER; note = 2'-O-methylcytidine
  modified_base 42: mod_base = OTHER; note = 2'-O-methylcytidine
  modified_base 43: mod_base = OTHER; note = 2'-O-methylcytidine
  modified_base 44: mod_base = OTHER; note = 2'-O-methyladenosine
  modified_base 45: mod_base = OTHER; note = 2'-O-methylcytidine
  modified_base 46: mod_base = OTHER; note = 2'-O-methylcytidine
  modified_base 47: mod_base = OTHER; note = 2'-O-methyladenosine
  modified_base 48: mod_base = OTHER; note = 2'-O-methylguanosine
  modified_base 49: mod_base = OTHER; note = 2'-O-methylcytidine
  modified_base 50: mod_base = OTHER; note = 2'-O-methyluridine
  modified_base 51: mod_base = OTHER; note = 2'-O-methyluridine
  modified_base 53: mod_base = OTHER; note = (S)-glycol cytidine
  modified_base 55: mod_base = OTHER; note = 2'-O-methyladenosine
  modified_base 56: mod_base = OTHER; note = 2'-O-methylcytidine
  modified_base 57: mod_base = OTHER; note = 2'-O-methyluridine
  modified_base 58: mod_base = OTHER; note = 2'-O-methyluridine
  modified_base 59: mod_base = OTHER; note = 2'-O-methylcytidine phosphorothioate
  modified_base 60: mod_base = OTHER; note = 2'-O-methylcytidine phosphorothioate
  modified_base 61: mod_base = OTHER; note = 2'-O-methyluridine phosphorothioate
  modified_base 62: mod_base = OTHER; note = 2'-O-methylguanosine phosphorothioate
  modified_base 63: mod_base = OTHER; note = 2'-O-methylcytidine
  misc_feature 1..51: note = RNA
  misc_feature 52: note = DNA
  misc_feature 53: note = RNA
  misc_feature 54: note = DNA
  misc_feature 55..63: note = RNA

SEQ ID NO: 231 - DNA, 63 bp, synthetic construct; identical to SEQ ID NO: 62
  source 1..63: mol_type = other DNA; note = Description of Artificial Sequence: Synthetic oligonucleotide; note = Description of Combined DNA/RNA Molecule: Synthetic oligonucleotide
  modified_base 1: mod_base = OTHER; note = 2'-O-methylguanosine phosphorothioate
  modified_base 2: mod_base = OTHER; note = 2'-O-methyluridine phosphorothioate
  modified_base 3: mod_base = OTHER; note = 2'-O-methylguanosine phosphorothioate
  modified_base 4: mod_base = OTHER; note = 2'-O-methylguanosine phosphorothioate
  modified_base 5: mod_base = OTHER; note = 2'-O-methyladenosine
  modified_base 6: mod_base = OTHER; note = 2'-O-methyladenosine
  modified_base 7: mod_base = OTHER; note = 2'-O-methyluridine
  modified_base 8: mod_base = OTHER; note = 2'-O-methyladenosine
  modified_base 9: mod_base = OTHER; note = 2'-O-methylguanosine
  modified_base 10: mod_base = OTHER; note = 2'-O-methyluridine
  modified_base 11: mod_base = OTHER; note = 2'-O-methyladenosine
  modified_base 12: mod_base = OTHER; note = 2'-O-methyluridine
  modified_base 13: mod_base = OTHER; note = 2'-O-methyladenosine
  modified_base 14: mod_base = OTHER; note = 2'-O-methyladenosine
  modified_base 15: mod_base = OTHER; note = 2'-O-methylcytidine
  modified_base 16: mod_base = OTHER; note = 2'-O-methyladenosine
  modified_base 17: mod_base = OTHER; note = 2'-O-methyladenosine
  modified_base 18: mod_base = OTHER; note = 2'-O-methyluridine
  modified_base 19: mod_base = OTHER; note = 2'-O-methyladenosine
  modified_base 20: mod_base = OTHER; note = 2'-O-methyluridine
  modified_base 21: mod_base = OTHER; note = 2'-O-methylguanosine
  modified_base 22: mod_base = OTHER; note = 2'-O-methylcytidine
  modified_base 23: mod_base = OTHER; note = 2'-O-methyluridine
  modified_base 24: mod_base = OTHER; note = 2'-O-methyladenosine
  modified_base 25: mod_base = OTHER; note = 2'-O-methyladenosine
  modified_base 26: mod_base = OTHER; note = 2'-O-methyladenosine
  modified_base 27: mod_base = OTHER; note = 2'-O-methyluridine
  modified_base 28: mod_base = OTHER; note = 2'-O-methylguanosine
  modified_base 29: mod_base = OTHER; note = 2'-O-methyluridine
  modified_base 30: mod_base = OTHER; note = 2'-O-methyluridine
  modified_base 31: mod_base = OTHER; note = 2'-O-methylguanosine
  modified_base 32: mod_base = OTHER; note = 2'-O-methyluridine
  modified_base 33: mod_base = OTHER; note = 2'-O-methyluridine
  modified_base 34: mod_base = OTHER; note = 2'-O-methyladenosine
  modified_base 35: mod_base = OTHER; note = 2'-O-methyluridine
  modified_base 36: mod_base = OTHER; note = 2'-O-methyladenosine
  modified_base 37: mod_base = OTHER; note = 2'-O-methylguanosine
  modified_base 38: mod_base = OTHER; note = 2'-O-methyluridine
  modified_base 39: mod_base = OTHER; note = 2'-O-methyladenosine
  modified_base 40: mod_base = OTHER; note = 2'-O-methyluridine
  modified_base 41: mod_base = OTHER; note = 2'-O-methylcytidine
  modified_base 42: mod_base = OTHER; note = 2'-O-methylcytidine
  modified_base 43: mod_base = OTHER; note = 2'-O-methylcytidine
  modified_base 44: mod_base = OTHER; note = 2'-O-methyladenosine
  modified_base 45: mod_base = OTHER; note = 2'-O-methylcytidine
  modified_base 46: mod_base = OTHER; note = 2'-O-methylcytidine
  modified_base 47: mod_base = OTHER; note = 2'-O-methyladenosine
  modified_base 48: mod_base = OTHER; note = 2'-O-methylguanosine
  modified_base 49: mod_base = OTHER; note = 2'-O-methylcytidine
  modified_base 50: mod_base = OTHER; note = 2'-O-methyluridine
  modified_base 51: mod_base = OTHER; note = 2'-O-methyluridine
  modified_base 52: mod_base = OTHER; note = (S)-glycol thymidine
  modified_base 53: mod_base = OTHER; note = (S)-glycol cytidine
  modified_base 55: mod_base = OTHER; note = 2'-O-methyladenosine
  modified_base 56: mod_base = OTHER; note = 2'-O-methylcytidine
  modified_base 57: mod_base = OTHER; note = 2'-O-methyluridine
  modified_base 58: mod_base = OTHER; note = 2'-O-methyluridine
  modified_base 59: mod_base = OTHER; note = 2'-O-methylcytidine phosphorothioate
  modified_base 60: mod_base = OTHER; note = 2'-O-methylcytidine phosphorothioate
  modified_base 61: mod_base = OTHER; note = 2'-O-methyluridine phosphorothioate
  modified_base 62: mod_base = OTHER; note = 2'-O-methylguanosine phosphorothioate
  modified_base 63: mod_base = OTHER; note = 2'-O-methylcytidine
  misc_feature 1..53: note = RNA
  misc_feature 54: note = DNA
  misc_feature 55..63: note = RNA

SEQ ID NO: 232 - DNA, 63 bp, synthetic construct; identical to SEQ ID NO: 62
  source 1..63: mol_type = other DNA; note = Description of Artificial Sequence: Synthetic oligonucleotide; note = Description of Combined DNA/RNA Molecule: Synthetic oligonucleotide
  modified_base 1: mod_base = OTHER; note = 2'-O-methylguanosine phosphorothioate
  modified_base 2: mod_base = OTHER; note = 2'-O-methyluridine phosphorothioate
  modified_base 3: mod_base = OTHER; note = 2'-O-methylguanosine phosphorothioate
  modified_base 4: mod_base = OTHER; note = 2'-O-methylguanosine phosphorothioate
  modified_base 5: mod_base = OTHER; note = 2'-O-methyladenosine
  modified_base 6: mod_base = OTHER; note = 2'-O-methyladenosine
  modified_base 7: mod_base = OTHER; note = 2'-O-methyluridine
  modified_base 8: mod_base = OTHER; note = 2'-O-methyladenosine
  modified_base 9: mod_base = OTHER; note = 2'-O-methylguanosine
  modified_base 10: mod_base = OTHER; note = 2'-O-methyluridine
  modified_base 11: mod_base = OTHER; note = 2'-O-methyladenosine
  modified_base 12: mod_base = OTHER; note = 2'-O-methyluridine
  modified_base 13: mod_base = OTHER; note = 2'-O-methyladenosine
  modified_base 14: mod_base = OTHER; note = 2'-O-methyladenosine
  modified_base 15: mod_base = OTHER; note = 2'-O-methylcytidine
  modified_base 16: mod_base = OTHER; note = 2'-O-methyladenosine
  modified_base 17: mod_base = OTHER; note = 2'-O-methyladenosine
  modified_base 18: mod_base = OTHER; note = 2'-O-methyluridine
  modified_base 19: mod_base = OTHER; note = 2'-O-methyladenosine
  modified_base 20: mod_base = OTHER; note = 2'-O-methyluridine
  modified_base 21: mod_base = OTHER; note = 2'-O-methylguanosine
  modified_base 22: mod_base = OTHER; note = 2'-O-methylcytidine
  modified_base 23: mod_base = OTHER; note = 2'-O-methyluridine
  modified_base 24: mod_base = OTHER; note = 2'-O-methyladenosine
  modified_base 25: mod_base = OTHER; note = 2'-O-methyladenosine
  modified_base 26: mod_base = OTHER; note = 2'-O-methyladenosine
  modified_base 27: mod_base = OTHER; note = 2'-O-methyluridine
  modified_base 28: mod_base = OTHER; note = 2'-O-methylguanosine
  modified_base 29: mod_base = OTHER; note = 2'-O-methyluridine
  modified_base 30: mod_base = OTHER; note = 2'-O-methyluridine
  modified_base 31: mod_base = OTHER; note = 2'-O-methylguanosine
  modified_base 32: mod_base = OTHER; note = 2'-O-methyluridine
  modified_base 33: mod_base = OTHER; note = 2'-O-methyluridine
  modified_base 34: mod_base = OTHER; note = 2'-O-methyladenosine
  modified_base 35: mod_base = OTHER; note = 2'-O-methyluridine
  modified_base 36: mod_base = OTHER; note = 2'-O-methyladenosine
  modified_base 37: mod_base = OTHER; note = 2'-O-methylguanosine
  modified_base 38: mod_base = OTHER; note = 2'-O-methyluridine
  modified_base 39: mod_base = OTHER; note = 2'-O-methyladenosine
  modified_base 40: mod_base = OTHER; note = 2'-O-methyluridine
  modified_base 41: mod_base = OTHER; note = 2'-O-methylcytidine
  modified_base 42: mod_base = OTHER; note = 2'-O-methylcytidine
  modified_base 43: mod_base = OTHER; note = 2'-O-methylcytidine
  modified_base 44: mod_base = OTHER; note = 2'-O-methyladenosine
  modified_base 45: mod_base = OTHER; note = 2'-O-methylcytidine
  modified_base 46: mod_base = OTHER; note = 2'-O-methylcytidine
  modified_base 47: mod_base = OTHER; note = 2'-O-methyladenosine
  modified_base 48: mod_base = OTHER; note = 2'-O-methylguanosine
  modified_base 49: mod_base = OTHER; note = 2'-O-methylcytidine
  modified_base 50: mod_base = OTHER; note = 2'-O-methyluridine
  modified_base 51: mod_base = OTHER; note = 2'-O-methyluridine
  modified_base 52: mod_base = OTHER; note = (R)-glycol thymidine
  modified_base 55: mod_base = OTHER; note = 2'-O-methyladenosine
  modified_base 56: mod_base = OTHER; note = 2'-O-methylcytidine
  modified_base 57: mod_base = OTHER; note = 2'-O-methyluridine
  modified_base 58: mod_base = OTHER; note = 2'-O-methyluridine
  modified_base 59: mod_base = OTHER; note = 2'-O-methylcytidine phosphorothioate
  modified_base 60: mod_base = OTHER; note = 2'-O-methylcytidine phosphorothioate
  modified_base 61: mod_base = OTHER; note = 2'-O-methyluridine phosphorothioate
  modified_base 62: mod_base = OTHER; note = 2'-O-methylguanosine phosphorothioate
  modified_base 63: mod_base = OTHER; note = 2'-O-methylcytidine
  misc_feature 1..52: note = RNA
  misc_feature 53..54: note = DNA
  misc_feature 55..63: note = RNA

SEQ ID NO: 233 - DNA, 63 bp, synthetic construct; identical to SEQ ID NO: 62
  source 1..63: mol_type = other DNA; note = Description of Artificial Sequence: Synthetic oligonucleotide; note = Description of Combined DNA/RNA Molecule: Synthetic oligonucleotide
  modified_base 1: mod_base = OTHER; note = 2'-O-methylguanosine phosphorothioate
  modified_base 2: mod_base = OTHER; note = 2'-O-methyluridine phosphorothioate
  modified_base 3: mod_base = OTHER; note = 2'-O-methylguanosine phosphorothioate
  modified_base 4: mod_base = OTHER; note = 2'-O-methylguanosine phosphorothioate
  modified_base 5: mod_base = OTHER; note = 2'-O-methyladenosine
  modified_base 6: mod_base = OTHER; note = 2'-O-methyladenosine
  modified_base 7: mod_base = OTHER; note = 2'-O-methyluridine
  modified_base 8: mod_base = OTHER; note = 2'-O-methyladenosine
  modified_base 9: mod_base = OTHER; note = 2'-O-methylguanosine
  modified_base 10: mod_base = OTHER; note = 2'-O-methyluridine
  modified_base 11: mod_base = OTHER; note = 2'-O-methyladenosine
  modified_base 12: mod_base = OTHER; note = 2'-O-methyluridine
  modified_base 13: mod_base = OTHER; note = 2'-O-methyladenosine
  modified_base 14: mod_base = OTHER; note = 2'-O-methyladenosine
  modified_base 15: mod_base = OTHER; note = 2'-O-methylcytidine
  modified_base 16: mod_base = OTHER; note = 2'-O-methyladenosine
  modified_base 17: mod_base = OTHER; note = 2'-O-methyladenosine
  modified_base 18: mod_base = OTHER; note = 2'-O-methyluridine
  modified_base 19: mod_base = OTHER; note = 2'-O-methyladenosine
  modified_base 20: mod_base = OTHER; note = 2'-O-methyluridine
  modified_base 21: mod_base = OTHER; note = 2'-O-methylguanosine
  modified_base 22: mod_base = OTHER; note = 2'-O-methylcytidine
  modified_base 23: mod_base = OTHER; note = 2'-O-methyluridine
  modified_base 24: mod_base = OTHER; note = 2'-O-methyladenosine
  modified_base 25: mod_base = OTHER; note = 2'-O-methyladenosine
  modified_base 26: mod_base = OTHER; note = 2'-O-methyladenosine
  modified_base 27: mod_base = OTHER; note = 2'-O-methyluridine
  modified_base 28: mod_base = OTHER; note = 2'-O-methylguanosine
  modified_base 29: mod_base = OTHER; note = 2'-O-methyluridine
  modified_base 30: mod_base = OTHER; note = 2'-O-methyluridine
  modified_base 31: mod_base = OTHER; note = 2'-O-methylguanosine
  modified_base 32: mod_base = OTHER; note = 2'-O-methyluridine
  modified_base 33: mod_base = OTHER; note = 2'-O-methyluridine
  modified_base 34: mod_base = OTHER; note = 2'-O-methyladenosine
  modified_base 35: mod_base = OTHER; note = 2'-O-methyluridine
  modified_base 36: mod_base = OTHER; note = 2'-O-methyladenosine
  modified_base 37: mod_base = OTHER; note = 2'-O-methylguanosine
  modified_base 38: mod_base = OTHER; note = 2'-O-methyluridine
  modified_base 39: mod_base = OTHER; note = 2'-O-methyladenosine
  modified_base 40: mod_base = OTHER; note = 2'-O-methyluridine
  modified_base 41: mod_base = OTHER; note = 2'-O-methylcytidine
  modified_base 42: mod_base = OTHER; note = 2'-O-methylcytidine
  modified_base 43: mod_base = OTHER; note = 2'-O-methylcytidine
  modified_base 44: mod_base = OTHER; note = 2'-O-methyladenosine
  modified_base 45: mod_base = OTHER; note = 2'-O-methylcytidine
  modified_base 46: mod_base = OTHER; note = 2'-O-methylcytidine
  modified_base 47: mod_base = OTHER; note = 2'-O-methyladenosine
  modified_base 48: mod_base = OTHER; note = 2'-O-methylguanosine
  modified_base 49: mod_base = OTHER; note = 2'-O-methylcytidine
  modified_base 50: mod_base = OTHER; note = 2'-O-methyluridine
  modified_base 51: mod_base = OTHER; note = 2'-O-methyluridine
  modified_base 53: mod_base = OTHER; note = (R)-glycol cytidine
  modified_base 55: mod_base = OTHER; note = 2'-O-methyladenosine
  modified_base 56: mod_base = OTHER; note = 2'-O-methylcytidine
  modified_base 57: mod_base = OTHER; note = 2'-O-methyluridine
  modified_base 58: mod_base = OTHER; note = 2'-O-methyluridine
  modified_base 59: mod_base = OTHER; note = 2'-O-methylcytidine phosphorothioate
  modified_base 60: mod_base = OTHER; note = 2'-O-methylcytidine phosphorothioate
  modified_base 61: mod_base = OTHER; note = 2'-O-methyluridine phosphorothioate
  modified_base 62: mod_base = OTHER; note = 2'-O-methylguanosine phosphorothioate
  modified_base 63: mod_base = OTHER; note = 2'-O-methylcytidine
  misc_feature 1..51: note = RNA
  misc_feature 52: note = DNA
  misc_feature 53: note = RNA
  misc_feature 54: note = DNA
  misc_feature 55..63: note = RNA

SEQ ID NO: 234 - DNA, 63 bp, synthetic construct; identical to SEQ ID NO: 62
  source 1..63: mol_type = other DNA; note = Description of Artificial Sequence: Synthetic oligonucleotide; note = Description of Combined DNA/RNA Molecule: Synthetic oligonucleotide
  modified_base 1: mod_base = OTHER; note = 2'-O-methylguanosine phosphorothioate
  modified_base 2: mod_base = OTHER; note = 2'-O-methyluridine phosphorothioate
  modified_base 3: mod_base = OTHER; note = 2'-O-methylguanosine phosphorothioate
  modified_base 4: mod_base = OTHER; note = 2'-O-methylguanosine phosphorothioate
  modified_base 5: mod_base = OTHER; note = 2'-O-methyladenosine
  modified_base 6: mod_base = OTHER; note = 2'-O-methyladenosine
  modified_base 7: mod_base = OTHER; note = 2'-O-methyluridine
  modified_base 8: mod_base = OTHER; note = 2'-O-methyladenosine
  modified_base 9: mod_base = OTHER; note = 2'-O-methylguanosine
  modified_base 10: mod_base = OTHER; note = 2'-O-methyluridine
  modified_base 11: mod_base = OTHER; note = 2'-O-methyladenosine
  modified_base 12: mod_base = OTHER; note = 2'-O-methyluridine
  modified_base 13: mod_base = OTHER; note = 2'-O-methyladenosine
  modified_base 14: mod_base = OTHER; note = 2'-O-methyladenosine
  modified_base 15: mod_base = OTHER; note = 2'-O-methylcytidine
  modified_base 16: mod_base = OTHER; note = 2'-O-methyladenosine
  modified_base 17: mod_base = OTHER; note = 2'-O-methyladenosine
  modified_base 18: mod_base = OTHER; note = 2'-O-methyluridine
  modified_base 19: mod_base = OTHER; note = 2'-O-methyladenosine
  modified_base 20: mod_base = OTHER; note = 2'-O-methyluridine
  modified_base 21: mod_base = OTHER; note = 2'-O-methylguanosine
  modified_base 22: mod_base = OTHER; note = 2'-O-methylcytidine
  modified_base 23: mod_base = OTHER; note = 2'-O-methyluridine
  modified_base 24: mod_base = OTHER; note = 2'-O-methyladenosine
  modified_base 25: mod_base = OTHER; note = 2'-O-methyladenosine
  modified_base 26: mod_base = OTHER; note = 2'-O-methyladenosine
  modified_base 27: mod_base = OTHER; note = 2'-O-methyluridine
  modified_base 28: mod_base = OTHER; note = 2'-O-methylguanosine
  modified_base 29: mod_base = OTHER; note = 2'-O-methyluridine
  modified_base 30: mod_base = OTHER; note = 2'-O-methyluridine
  modified_base 31: mod_base = OTHER; note = 2'-O-methylguanosine
  modified_base 32: mod_base = OTHER; note = 2'-O-methyluridine
  modified_base 33: mod_base = OTHER; note = 2'-O-methyluridine
  modified_base 34: mod_base = OTHER; note = 2'-O-methyladenosine
  modified_base 35: mod_base = OTHER; note = 2'-O-methyluridine
  modified_base 36: mod_base = OTHER; note = 2'-O-methyladenosine
  modified_base 37: mod_base = OTHER; note = 2'-O-methylguanosine
  modified_base 38: mod_base = OTHER; note = 2'-O-methyluridine
  modified_base 39: mod_base = OTHER; note = 2'-O-methyladenosine
  modified_base 40: mod_base = OTHER; note = 2'-O-methyluridine
  modified_base 41: mod_base = OTHER; note = 2'-O-methylcytidine
  modified_base 42: mod_base = OTHER; note = 2'-O-methylcytidine
  modified_base 43: mod_base = OTHER; note = 2'-O-methylcytidine
  modified_base 44: mod_base = OTHER; note = 2'-O-methyladenosine
  modified_base 45: mod_base = OTHER; note = 2'-O-methylcytidine
  modified_base 46: mod_base = OTHER; note = 2'-O-methylcytidine
  modified_base 47: mod_base = OTHER; note = 2'-O-methyladenosine
  modified_base 48: mod_base = OTHER; note = 2'-O-methylguanosine
  modified_base 49: mod_base = OTHER; note = 2'-O-methylcytidine
  modified_base 50: mod_base = OTHER; note = 2'-O-methyluridine
  modified_base 51: mod_base = OTHER; note = 2'-O-methyluridine
  modified_base 54: mod_base = OTHER; note = (R)-glycol cytidine
  modified_base 55: mod_base = OTHER; note = 2'-O-methyladenosine
  modified_base 56: mod_base = OTHER; note = 2'-O-methylcytidine
  modified_base 57: mod_base = OTHER; note = 2'-O-methyluridine
  modified_base 58: mod_base = OTHER; note = 2'-O-methyluridine
  modified_base 59: mod_base = OTHER; note = 2'-O-methylcytidine phosphorothioate
  modified_base 60: mod_base = OTHER; note = 2'-O-methylcytidine phosphorothioate
  modified_base 61: mod_base = OTHER; note = 2'-O-methyluridine phosphorothioate
  modified_base 62: mod_base = OTHER; note = 2'-O-methylguanosine phosphorothioate
  modified_base 63: mod_base = OTHER; note = 2'-O-methylcytidine
  misc_feature 1..51: note = RNA
  misc_feature 52..53: note = DNA
  misc_feature 54..63: note = RNA

SEQ ID NO: 235 - DNA, 63 bp, synthetic construct; identical to SEQ ID NO: 62
  source 1..63: mol_type = other DNA; note = Description of Artificial Sequence: Synthetic oligonucleotide; note = Description of Combined DNA/RNA Molecule: Synthetic oligonucleotide
  modified_base 1: mod_base = OTHER; note = 2'-O-methylguanosine phosphorothioate
  modified_base 2: mod_base = OTHER; note = 2'-O-methyluridine phosphorothioate
  modified_base 3: mod_base = OTHER; note = 2'-O-methylguanosine phosphorothioate
  modified_base 4: mod_base = OTHER; note = 2'-O-methylguanosine phosphorothioate
  modified_base 5: mod_base = OTHER; note = 2'-O-methyladenosine
  modified_base 6: mod_base = OTHER; note = 2'-O-methyladenosine
  modified_base 7: mod_base = OTHER; note = 2'-O-methyluridine
  modified_base 8: mod_base = OTHER; note = 2'-O-methyladenosine
  modified_base 9: mod_base = OTHER; note = 2'-O-methylguanosine
  modified_base 10: mod_base = OTHER; note = 2'-O-methyluridine
  modified_base 11: mod_base = OTHER; note = 2'-O-methyladenosine
  modified_base 12: mod_base = OTHER; note = 2'-O-methyluridine
  modified_base 13: mod_base = OTHER; note = 2'-O-methyladenosine
  modified_base 14: mod_base = OTHER; note = 2'-O-methyladenosine
  modified_base 15: mod_base = OTHER; note = 2'-O-methylcytidine
  modified_base 16: mod_base = OTHER; note = 2'-O-methyladenosine
  modified_base 17: mod_base = OTHER; note = 2'-O-methyladenosine
  modified_base 18: mod_base = OTHER; note = 2'-O-methyluridine
  modified_base 19: mod_base = OTHER; note = 2'-O-methyladenosine
  modified_base 20: mod_base = OTHER; note = 2'-O-methyluridine
  modified_base 21: mod_base = OTHER; note = 2'-O-methylguanosine
  modified_base 22: mod_base = OTHER; note = 2'-O-methylcytidine
  modified_base 23: mod_base = OTHER; note = 2'-O-methyluridine
  modified_base 24: mod_base = OTHER; note = 2'-O-methyladenosine
  modified_base 25: mod_base = OTHER; note = 2'-O-methyladenosine
  modified_base 26: mod_base = OTHER; note = 2'-O-methyladenosine
  modified_base 27: mod_base = OTHER; note = 2'-O-methyluridine
  modified_base 28: mod_base = OTHER; note = 2'-O-methylguanosine
  modified_base 29: mod_base = OTHER; note = 2'-O-methyluridine
  modified_base 30: mod_base = OTHER; note = 2'-O-methyluridine
  modified_base 31: mod_base = OTHER; note = 2'-O-methylguanosine
  modified_base 32: mod_base = OTHER; note = 2'-O-methyluridine
  modified_base 33: mod_base = OTHER; note = 2'-O-methyluridine
  modified_base 34: mod_base = OTHER; note = 2'-O-methyladenosine
  modified_base 35: mod_base = OTHER; note = 2'-O-methyluridine
  modified_base 36: mod_base = OTHER; note = 2'-O-methyladenosine
  modified_base 37: mod_base = OTHER; note = 2'-O-methylguanosine
  modified_base 38: mod_base = OTHER; note = 2'-O-methyluridine
  modified_base 39: mod_base = OTHER; note = 2'-O-methyladenosine
  modified_base 40: mod_base = OTHER; note = 2'-O-methyluridine
  modified_base 41: mod_base = OTHER; note = 2'-O-methylcytidine
  modified_base 42: mod_base = OTHER; note = 2'-O-methylcytidine
  modified_base 43: mod_base = OTHER; note = 2'-O-methylcytidine
  modified_base 44: mod_base = OTHER; note = 2'-O-methyladenosine
  modified_base 45: mod_base = OTHER; note = 2'-O-methylcytidine
  modified_base 46: mod_base = OTHER; note = 2'-O-methylcytidine
  modified_base 47: mod_base = OTHER; note = 2'-O-methyladenosine
  modified_base 48: mod_base = OTHER; note = 2'-O-methylguanosine
  modified_base 49: mod_base = OTHER; note = 2'-O-methylcytidine
  modified_base 50: mod_base = OTHER; note = 2'-O-methyluridine
  modified_base 51: mod_base = OTHER; note = 2'-O-methyluridine
  modified_base 52: mod_base = OTHER; note = Serinol thymidine
  modified_base 55: mod_base = OTHER; note = 2'-O-methyladenosine
  modified_base 56: mod_base = OTHER; note = 2'-O-methylcytidine
  modified_base 57: mod_base = OTHER; note = 2'-O-methyluridine
  modified_base 58: mod_base = OTHER; note = 2'-O-methyluridine
  modified_base 59: mod_base = OTHER; note = 2'-O-methylcytidine phosphorothioate
  modified_base 60: mod_base = OTHER; note = 2'-O-methylcytidine phosphorothioate
  modified_base 61: mod_base = OTHER; note = 2'-O-methyluridine phosphorothioate
  modified_base 62: mod_base = OTHER; note = 2'-O-methylguanosine phosphorothioate
  modified_base 63: mod_base = OTHER; note = 2'-O-methylcytidine
  misc_feature 1..52: note = RNA
  misc_feature 53..54: note = DNA
  misc_feature 55..63: note = RNA

SEQ ID NO: 236 - DNA, 63 bp, synthetic construct; identical to SEQ ID NO: 62
  source 1..63: mol_type = other DNA; note = Description of Artificial Sequence: Synthetic oligonucleotide; note = Description of Combined DNA/RNA Molecule: Synthetic oligonucleotide
  modified_base 1: mod_base = OTHER; note = 2'-O-methylguanosine phosphorothioate
  modified_base 2: mod_base = OTHER; note = 2'-O-methyluridine phosphorothioate
  modified_base 3: mod_base = OTHER; note = 2'-O-methylguanosine phosphorothioate
  modified_base 4: mod_base = OTHER; note = 2'-O-methylguanosine phosphorothioate
  modified_base 5: mod_base = OTHER; note = 2'-O-methyladenosine
  modified_base 6: mod_base = OTHER; note = 2'-O-methyladenosine
  modified_base 7: mod_base = OTHER; note = 2'-O-methyluridine
  modified_base 8: mod_base = OTHER; note = 2'-O-methyladenosine
  modified_base 9: mod_base = OTHER; note = 2'-O-methylguanosine
  modified_base 10: mod_base = OTHER; note = 2'-O-methyluridine
  modified_base 11: mod_base = OTHER; note = 2'-O-methyladenosine
  modified_base 12: mod_base = OTHER; note = 2'-O-methyluridine
  modified_base 13: mod_base = OTHER; note = 2'-O-methyladenosine
  modified_base 14: mod_base = OTHER; note = 2'-O-methyladenosine
  modified_base 15: mod_base = OTHER; note = 2'-O-methylcytidine
  modified_base 16: mod_base = OTHER; note = 2'-O-methyladenosine
  modified_base 17: mod_base = OTHER; note = 2'-O-methyladenosine
  modified_base 18: mod_base = OTHER; note = 2'-O-methyluridine
  modified_base 19: mod_base = OTHER; note = 2'-O-methyladenosine
  modified_base 20: mod_base = OTHER; note = 2'-O-methyluridine
  modified_base 21: mod_base = OTHER; note = 2'-O-methylguanosine
  modified_base 22: mod_base = OTHER; note = 2'-O-methylcytidine
  modified_base 23: mod_base = OTHER; note = 2'-O-methyluridine
  modified_base 24: mod_base = OTHER; note = 2'-O-methyladenosine
  modified_base 25: mod_base = OTHER; note = 2'-O-methyladenosine
  modified_base 26: mod_base = OTHER; note = 2'-O-methyladenosine
  modified_base 27: mod_base = OTHER; note = 2'-O-methyluridine
  modified_base 28: mod_base = OTHER; note = 2'-O-methylguanosine
  modified_base 29: mod_base = OTHER; note = 2'-O-methyluridine
  modified_base 30: mod_base = OTHER; note = 2'-O-methyluridine
  modified_base 31: mod_base = OTHER; note = 2'-O-methylguanosine
  modified_base 32: mod_base = OTHER; note = 2'-O-methyluridine
  modified_base 33: mod_base = OTHER; note = 2'-O-methyluridine
  modified_base 34: mod_base = OTHER; note = 2'-O-methyladenosine
  modified_base 35: mod_base = OTHER; note = 2'-O-methyluridine
  modified_base 36: mod_base = OTHER; note = 2'-O-methyladenosine
  modified_base 37: mod_base = OTHER; note = 2'-O-methylguanosine
  modified_base 38: mod_base = OTHER; note = 2'-O-methyluridine
  modified_base 39: mod_base = OTHER; note = 2'-O-methyladenosine
  modified_base 40: mod_base = OTHER; note = 2'-O-methyluridine
  modified_base 41: mod_base = OTHER; note = 2'-O-methylcytidine
  modified_base 42: mod_base = OTHER; note = 2'-O-methylcytidine
  modified_base 43: mod_base = OTHER; note = 2'-O-methylcytidine
  modified_base 44: mod_base = OTHER; note = 2'-O-methyladenosine
  modified_base 45: mod_base = OTHER; note = 2'-O-methylcytidine
  modified_base 46: mod_base = OTHER; note = 2'-O-methylcytidine
  modified_base 47: mod_base = OTHER; note = 2'-O-methyladenosine
  modified_base 48: mod_base = OTHER; note = 2'-O-methylguanosine
  modified_base 49: mod_base = OTHER; note = 2'-O-methylcytidine
  modified_base 50: mod_base = OTHER; note = 2'-O-methyluridine
  modified_base 51: mod_base = OTHER; note = 2'-O-methyluridine
  modified_base 53: mod_base = OTHER; note = Serinol cytidine
  modified_base 55: mod_base = OTHER; note = 2'-O-methyladenosine
  modified_base 56: mod_base = OTHER; note = 2'-O-methylcytidine
  modified_base 57: mod_base = OTHER; note = 2'-O-methyluridine
  modified_base 58: mod_base = OTHER; note = 2'-O-methyluridine
  modified_base 59: mod_base = OTHER; note = 2'-O-methylcytidine phosphorothioate
  modified_base 60: mod_base = OTHER; note = 2'-O-methylcytidine phosphorothioate
  modified_base 61: mod_base = OTHER; note = 2'-O-methyluridine phosphorothioate
  modified_base 62: mod_base = OTHER; note = 2'-O-methylguanosine phosphorothioate
  modified_base 63: mod_base = OTHER; note = 2'-O-methylcytidine
  misc_feature 1..51: note = RNA
  misc_feature 52: note = DNA
  misc_feature 53: note = RNA
  misc_feature 54: note = DNA
  misc_feature 55..63: note = RNA

SEQ ID NO: 237 - DNA, 63 bp, synthetic construct; identical to SEQ ID NO: 62
  source 1..63: mol_type = other DNA; note = Description of Artificial Sequence: Synthetic oligonucleotide; note = Description of Combined DNA/RNA Molecule: Synthetic oligonucleotide
  modified_base 1: mod_base = OTHER; note = 2'-O-methylguanosine phosphorothioate
  modified_base 2: mod_base = OTHER; note = 2'-O-methyluridine phosphorothioate
  modified_base 3: mod_base = OTHER; note = 2'-O-methylguanosine phosphorothioate
  modified_base 4: mod_base = OTHER; note = 2'-O-methylguanosine phosphorothioate
  modified_base 5: mod_base = OTHER; note = 2'-O-methyladenosine
  modified_base 6: mod_base = OTHER; note = 2'-O-methyladenosine
  modified_base 7: mod_base = OTHER; note = 2'-O-methyluridine
  modified_base 8: mod_base = OTHER; note = 2'-O-methyladenosine
  modified_base 9: mod_base = OTHER; note = 2'-O-methylguanosine
  modified_base 10: mod_base = OTHER; note = 2'-O-methyluridine
  modified_base 11: mod_base = OTHER; note = 2'-O-methyladenosine
  modified_base 12: mod_base = OTHER; note = 2'-O-methyluridine
  modified_base 13: mod_base = OTHER; note = 2'-O-methyladenosine
  modified_base 14: mod_base = OTHER; note = 2'-O-methyladenosine
  modified_base 15: mod_base = OTHER; note = 2'-O-methylcytidine
  modified_base 16: mod_base = OTHER; note = 2'-O-methyladenosine
  modified_base 17: mod_base = OTHER; note = 2'-O-methyladenosine
  modified_base 18: mod_base = OTHER; note = 2'-O-methyluridine
  modified_base 19: mod_base = OTHER; note = 2'-O-methyladenosine
  modified_base 20: mod_base = OTHER; note = 2'-O-methyluridine
  modified_base 21: mod_base = OTHER; note = 2'-O-methylguanosine
  modified_base 22: mod_base = OTHER; note = 2'-O-methylcytidine
  modified_base 23: mod_base = OTHER; note = 2'-O-methyluridine
  modified_base 24: mod_base = OTHER; note = 2'-O-methyladenosine
  modified_base 25: mod_base = OTHER; note = 2'-O-methyladenosine
  modified_base 26: mod_base = OTHER; note = 2'-O-methyladenosine
  modified_base 27: mod_base = OTHER; note = 2'-O-methyluridine
  modified_base 28: mod_base = OTHER; note = 2'-O-methylguanosine
  modified_base 29: mod_base = OTHER; note = 2'-O-methyluridine
  modified_base 30: mod_base = OTHER; note = 2'-O-methyluridine
  modified_base 31: mod_base = OTHER; note = 2'-O-methylguanosine
  modified_base 32: mod_base = OTHER; note = 2'-O-methyluridine
  modified_base 33: mod_base = OTHER; note = 2'-O-methyluridine
  modified_base 34: mod_base = OTHER; note = 2'-O-methyladenosine
  modified_base 35: mod_base = OTHER; note = 2'-O-methyluridine
  modified_base 36: mod_base = OTHER; note = 2'-O-methyladenosine
  modified_base 37: mod_base = OTHER; note = 2'-O-methylguanosine
  modified_base 38: mod_base = OTHER; note = 2'-O-methyluridine
  modified_base 39: mod_base = OTHER; note = 2'-O-methyladenosine
  modified_base 40: mod_base = OTHER; note = 2'-O-methyluridine
  modified_base 41: mod_base = OTHER; note = 2'-O-methylcytidine
  modified_base 42: mod_base = OTHER; note = 2'-O-methylcytidine
  modified_base 43: mod_base = OTHER; note = 2'-O-methylcytidine
  modified_base 44: mod_base = OTHER; note = 2'-O-methyladenosine
  modified_base 45: mod_base = OTHER; note = 2'-O-methylcytidine
  modified_base 46: mod_base = OTHER; note = 2'-O-methylcytidine
  modified_base 47: mod_base = OTHER; note = 2'-O-methyladenosine
  modified_base 48: mod_base = OTHER; note = 2'-O-methylguanosine
  modified_base 49: mod_base = OTHER; note = 2'-O-methylcytidine
  modified_base 50: mod_base = OTHER; note = 2'-O-methyluridine
  modified_base 51: mod_base = OTHER; note = 2'-O-methyluridine
  modified_base 54: mod_base = OTHER; note = Serinol cytidine
  modified_base 55: mod_base = OTHER; note = 2'-O-methyladenosine
  modified_base 56: mod_base = OTHER; note = 2'-O-methylcytidine
  modified_base 57: mod_base = OTHER; note = 2'-O-methyluridine
  modified_base 58: mod_base = OTHER; note = 2'-O-methyluridine
  modified_base 59: mod_base = OTHER; note = 2'-O-methylcytidine phosphorothioate
  modified_base 60: mod_base = OTHER; note = 2'-O-methylcytidine phosphorothioate
  modified_base 61: mod_base = OTHER; note = 2'-O-methyluridine phosphorothioate
  modified_base 62: mod_base = OTHER; note = 2'-O-methylguanosine phosphorothioate
  modified_base 63: mod_base = OTHER; note = 2'-O-methylcytidine
  misc_feature 1..51: note = RNA
  misc_feature 52..53: note = DNA
  misc_feature 54..63: note = RNA

SEQ ID NO: 238 - DNA, 63 bp, synthetic construct; identical to SEQ ID NO: 62
  source 1..63: mol_type = other DNA; note = Description of Artificial Sequence: Synthetic oligonucleotide; note = Description of Combined DNA/RNA Molecule: Synthetic oligonucleotide
  modified_base 1: mod_base = OTHER; note = 2'-O-methylguanosine phosphorothioate
  modified_base 2: mod_base = OTHER; note = 2'-O-methyluridine phosphorothioate
  modified_base 3: mod_base = OTHER; note = 2'-O-methylguanosine phosphorothioate
  modified_base 4: mod_base = OTHER; note = 2'-O-methylguanosine phosphorothioate
  modified_base 5: mod_base = OTHER; note = 2'-O-methyladenosine
  modified_base 6: mod_base = OTHER; note = 2'-O-methyladenosine
  modified_base 7: mod_base = OTHER; note = 2'-O-methyluridine
  modified_base 8: mod_base = OTHER; note = 2'-O-methyladenosine
  modified_base 9: mod_base = OTHER; note = 2'-O-methylguanosine
  modified_base 10: mod_base = OTHER; note = 2'-O-methyluridine
  modified_base 11: mod_base = OTHER; note = 2'-O-methyladenosine
  modified_base 12: mod_base = OTHER; note = 2'-O-methyluridine
  modified_base 13: mod_base = OTHER; note = 2'-O-methyladenosine
  modified_base 14: mod_base = OTHER; note = 2'-O-methyladenosine
  modified_base 15: mod_base = OTHER; note = 2'-O-methylcytidine
  modified_base 16: mod_base = OTHER; note = 2'-O-methyladenosine
  modified_base 17: mod_base = OTHER; note = 2'-O-methyladenosine
  modified_base 18: mod_base = OTHER; note = 2'-O-methyluridine
  modified_base 19: mod_base = OTHER; note = 2'-O-methyladenosine
  modified_base 20: mod_base = OTHER; note = 2'-O-methyluridine
  modified_base 21: mod_base = OTHER; note = 2'-O-methylguanosine
  modified_base 22: mod_base = OTHER; note = 2'-O-methylcytidine
  modified_base 23: mod_base = OTHER; note = 2'-O-methyluridine
  modified_base 24: mod_base = OTHER; note = 2'-O-methyladenosine
  modified_base 25: mod_base = OTHER; note = 2'-O-methyladenosine
  modified_base 26: mod_base = OTHER; note = 2'-O-methyladenosine
  modified_base 27: mod_base = OTHER; note = 2'-O-methyluridine
  modified_base 28: mod_base = OTHER; note = 2'-O-methylguanosine
  modified_base 29: mod_base = OTHER; note = 2'-O-methyluridine
  modified_base 30: mod_base = OTHER; note = 2'-O-methyluridine
  modified_base 31: mod_base = OTHER; note = 2'-O-methylguanosine
  modified_base 32: mod_base = OTHER; note = 2'-O-methyluridine
  modified_base 33: mod_base = OTHER; note = 2'-O-methyluridine
  modified_base 34: mod_base = OTHER; note = 2'-O-methyladenosine
  modified_base 35: mod_base = OTHER; note = 2'-O-methyluridine
  modified_base 36: mod_base = OTHER; note = 2'-O-methyladenosine
  modified_base 37: mod_base = OTHER; note = 2'-O-methylguanosine
  modified_base 38: mod_base = OTHER; note = 2'-O-methyluridine
  modified_base 39: mod_base = OTHER; note = 2'-O-methyladenosine
  modified_base 40: mod_base = OTHER; note = 2'-O-methyluridine
  modified_base 41: mod_base = OTHER; note = 2'-O-methylcytidine
  modified_base 42: mod_base = OTHER; note = 2'-O-methylcytidine
  modified_base 43: mod_base = OTHER; note = 2'-O-methylcytidine
  modified_base 44: mod_base = OTHER; note = 2'-O-methyladenosine
  modified_base 45: mod_base = OTHER; note = 2'-O-methylcytidine
  modified_base 46: mod_base = OTHER; note = 2'-O-methylcytidine
  modified_base 47: mod_base = OTHER; note = 2'-O-methyladenosine
  modified_base 48: mod_base = OTHER; note = 2'-O-methylguanosine
  modified_base 49: mod_base = OTHER; note = 2'-O-methylcytidine
  modified_base 50: mod_base = OTHER; note = 2'-O-methyluridine
  modified_base 51: mod_base = OTHER; note = 2'-O-methyluridine
  modified_base 52: mod_base = OTHER; note = Flexible thymidine
  modified_base 55: mod_base = OTHER; note = 2'-O-methyladenosine
  modified_base 56: mod_base = OTHER; note = 2'-O-methylcytidine
  modified_base 57: mod_base = OTHER; note = 2'-O-methyluridine
  modified_base 58: mod_base = OTHER; note = 2'-O-methyluridine
  modified_base 59: mod_base = OTHER; note = 2'-O-methylcytidine phosphorothioate
  modified_base 60: mod_base = OTHER; note = 2'-O-methylcytidine phosphorothioate
  modified_base 61: mod_base = OTHER; note = 2'-O-methyluridine phosphorothioate
  modified_base 62: mod_base = OTHER; note = 2'-O-methylguanosine phosphorothioate
  modified_base 63: mod_base = OTHER; note = 2'-O-methylcytidine
  misc_feature 1..52: note = RNA
  misc_feature 53..54: note = DNA
  misc_feature 55..63: note = RNA

SEQ ID NO: 239 - DNA, 63 bp, synthetic construct; identical to SEQ ID NO: 62
  source 1..63: mol_type = other DNA; note = Description of Artificial Sequence: Synthetic oligonucleotide; note = Description of Combined DNA/RNA Molecule: Synthetic oligonucleotide
  modified_base 1: mod_base = OTHER; note = 2'-O-methylguanosine phosphorothioate
  modified_base 2: mod_base = OTHER; note = 2'-O-methyluridine phosphorothioate
  modified_base 3: mod_base = OTHER; note = 2'-O-methylguanosine phosphorothioate
  modified_base 4: mod_base = OTHER; note = 2'-O-methylguanosine phosphorothioate
  modified_base 5: mod_base = OTHER; note = 2'-O-methyladenosine
  modified_base 6: mod_base = OTHER; note = 2'-O-methyladenosine
  modified_base 7: mod_base = OTHER; note = 2'-O-methyluridine
  modified_base 8: mod_base = OTHER; note = 2'-O-methyladenosine
  modified_base 9: mod_base = OTHER; note = 2'-O-methylguanosine
  modified_base 10: mod_base = OTHER; note = 2'-O-methyluridine
  modified_base 11: mod_base = OTHER; note = 2'-O-methyladenosine
  modified_base 12: mod_base = OTHER; note = 2'-O-methyluridine
  modified_base 13: mod_base = OTHER; note = 2'-O-methyladenosine
  modified_base 14: mod_base = OTHER; note = 2'-O-methyladenosine
  modified_base 15: mod_base = OTHER; note = 2'-O-methylcytidine
  modified_base 16: mod_base = OTHER; note = 2'-O-methyladenosine
  modified_base 17: mod_base = OTHER; note = 2'-O-methyladenosine
  modified_base 18: mod_base = OTHER; note = 2'-O-methyluridine
  modified_base 19: mod_base = OTHER; note = 2'-O-methyladenosine
  modified_base 20: mod_base = OTHER; note = 2'-O-methyluridine
  modified_base 21: mod_base = OTHER; note = 2'-O-methylguanosine
  modified_base 22: mod_base = OTHER; note = 2'-O-methylcytidine
  modified_base 23: mod_base = OTHER; note = 2'-O-methyluridine
  modified_base 24: mod_base = OTHER; note = 2'-O-methyladenosine
  modified_base 25: mod_base = OTHER; note = 2'-O-methyladenosine
  modified_base 26: mod_base = OTHER; note = 2'-O-methyladenosine
  modified_base 27: mod_base = OTHER; note = 2'-O-methyluridine
  modified_base 28: mod_base = OTHER; note = 2'-O-methylguanosine
  modified_base 29: mod_base = OTHER; note = 2'-O-methyluridine
  modified_base 30: mod_base = OTHER; note = 2'-O-methyluridine
  modified_base 31: mod_base = OTHER; note = 2'-O-methylguanosine
  modified_base 32: mod_base = OTHER; note = 2'-O-methyluridine
  modified_base 33: mod_base = OTHER; note = 2'-O-methyluridine
  modified_base 34: mod_base = OTHER; note = 2'-O-methyladenosine
  modified_base 35: mod_base = OTHER; note = 2'-O-methyluridine
  modified_base 36: mod_base = OTHER; note = 2'-O-methyladenosine
  modified_base 37: mod_base = OTHER; note = 2'-O-methylguanosine
  modified_base 38: mod_base = OTHER; note = 2'-O-methyluridine
  modified_base 39: mod_base = OTHER; note = 2'-O-methyladenosine
  modified_base 40: mod_base = OTHER; note = 2'-O-methyluridine
  modified_base 41: mod_base = OTHER; note = 2'-O-methylcytidine
  modified_base 42: mod_base = OTHER; note = 2'-O-methylcytidine
  modified_base 43: mod_base = OTHER; note = 2'-O-methylcytidine
  modified_base 44: mod_base = OTHER; note = 2'-O-methyladenosine
  modified_base 45: mod_base = OTHER; note = 2'-O-methylcytidine
  modified_base 46: mod_base = OTHER; note = 2'-O-methylcytidine
  modified_base 47: mod_base = OTHER; note = 2'-O-methyladenosine
  modified_base 48: mod_base = OTHER; note = 2'-O-methylguanosine
  modified_base 49: mod_base = OTHER; note = 2'-O-methylcytidine
  modified_base 50: mod_base = OTHER; note = 2'-O-methyluridine
  modified_base 51: mod_base = OTHER; note = 2'-O-methyluridine
  modified_base 53: mod_base = OTHER; note = Flexible cytidine
  modified_base 55: mod_base = OTHER; note = 2'-O-methyladenosine
  modified_base 56: mod_base = OTHER; note = 2'-O-methylcytidine
  modified_base 57: mod_base = OTHER; note = 2'-O-methyluridine
  modified_base 58: mod_base = OTHER; note = 2'-O-methyluridine
  modified_base 59: mod_base = OTHER; note = 2'-O-methylcytidine phosphorothioate
  modified_base 60: mod_base = OTHER; note = 2'-O-methylcytidine phosphorothioate
  modified_base 61: mod_base = OTHER; note = 2'-O-methyluridine phosphorothioate
  modified_base 62: mod_base = OTHER; note = 2'-O-methylguanosine phosphorothioate
  modified_base 63: mod_base = OTHER; note = 2'-O-methylcytidine
  misc_feature 1..51: note = RNA
  misc_feature 52: note = DNA
  misc_feature 53: note = RNA
  misc_feature 54: note = DNA
  misc_feature 55..63: note = RNA

SEQ ID NO: 240 - DNA, 63 bp, synthetic construct; identical to SEQ ID NO: 62
  source 1..63: mol_type = other DNA; note = Description of Artificial Sequence: Synthetic oligonucleotide; note = Description of Combined DNA/RNA Molecule: Synthetic oligonucleotide
  modified_base 1: mod_base = OTHER; note = 2'-O-methylguanosine phosphorothioate
  modified_base 2: mod_base = OTHER; note = 2'-O-methyluridine phosphorothioate
  modified_base 3: mod_base = OTHER; note = 2'-O-methylguanosine phosphorothioate
  modified_base 4: mod_base = OTHER; note = 2'-O-methylguanosine phosphorothioate
  modified_base 5: mod_base = OTHER; note = 2'-O-methyladenosine
  modified_base 6: mod_base = OTHER; note = 2'-O-methyladenosine
  modified_base 7: mod_base = OTHER; note = 2'-O-methyluridine
  modified_base 8: mod_base = OTHER; note = 2'-O-methyladenosine
  modified_base 9: mod_base = OTHER; note = 2'-O-methylguanosine
  modified_base 10: mod_base = OTHER; note = 2'-O-methyluridine
  modified_base 11: mod_base = OTHER; note = 2'-O-methyladenosine
  modified_base 12: mod_base = OTHER; note = 2'-O-methyluridine
  modified_base 13: mod_base = OTHER; note = 2'-O-methyladenosine
  modified_base 14: mod_base = OTHER; note = 2'-O-methyladenosine
  modified_base 15: mod_base = OTHER; note = 2'-O-methylcytidine
  modified_base 16: mod_base = OTHER; note = 2'-O-methyladenosine
  modified_base 17: mod_base = OTHER; note = 2'-O-methyladenosine
  modified_base 18: mod_base = OTHER; note = 2'-O-methyluridine
  modified_base 19: mod_base = OTHER; note = 2'-O-methyladenosine
  modified_base 20: mod_base = OTHER; note = 2'-O-methyluridine
  modified_base 21: mod_base = OTHER; note = 2'-O-methylguanosine
  modified_base 22: mod_base = OTHER; note = 2'-O-methylcytidine
  modified_base 23: mod_base = OTHER; note = 2'-O-methyluridine
  modified_base 24: mod_base = OTHER; note = 2'-O-methyladenosine
  modified_base 25: mod_base = OTHER; note = 2'-O-methyladenosine
  modified_base 26: mod_base = OTHER; note = 2'-O-methyladenosine
  modified_base 27: mod_base = OTHER; note = 2'-O-methyluridine
  modified_base 28: mod_base = OTHER; note = 2'-O-methylguanosine
  modified_base 29: mod_base = OTHER; note = 2'-O-methyluridine
  modified_base 30: mod_base = OTHER; note = 2'-O-methyluridine
  modified_base 31: mod_base = OTHER; note = 2'-O-methylguanosine
  modified_base 32: mod_base = OTHER; note = 2'-O-methyluridine
  modified_base 33: mod_base = OTHER; note = 2'-O-methyluridine
  modified_base 34: mod_base = OTHER; note = 2'-O-methyladenosine
  modified_base 35: mod_base = OTHER; note = 2'-O-methyluridine
  modified_base 36: mod_base = OTHER; note = 2'-O-methyladenosine
  modified_base 37: mod_base = OTHER; note = 2'-O-methylguanosine
  modified_base 38: mod_base = OTHER; note = 2'-O-methyluridine
  modified_base 39: mod_base = OTHER; note = 2'-O-methyladenosine
  modified_base 40: mod_base = OTHER; note = 2'-O-methyluridine
  modified_base 41: mod_base = OTHER; note = 2'-O-methylcytidine
  modified_base 42: mod_base = OTHER; note = 2'-O-methylcytidine
  modified_base 43: mod_base = OTHER; note = 2'-O-methylcytidine
  modified_base 44: mod_base = OTHER; note = 2'-O-methyladenosine
  modified_base 45: mod_base = OTHER; note = 2'-O-methylcytidine
  modified_base 46: mod_base = OTHER; note = 2'-O-methylcytidine
  modified_base 47: mod_base = OTHER; note = 2'-O-methyladenosine
  modified_base 48: mod_base = OTHER; note = 2'-O-methylguanosine
  modified_base 49: mod_base = OTHER; note = 2'-O-methylcytidine
  modified_base 50: mod_base = OTHER; note = 2'-O-methyluridine
  modified_base 51: mod_base = OTHER; note = 2'-O-methyluridine
  modified_base 54: mod_base = OTHER; note = Flexible cytidine
  modified_base 55: mod_base = OTHER; note = 2'-O-methyladenosine
  modified_base 56: mod_base = OTHER; note = 2'-O-methylcytidine
  modified_base 57: mod_base = OTHER; note = 2'-O-methyluridine
  modified_base 58: mod_base = OTHER; note = 2'-O-methyluridine
  modified_base 59: mod_base = OTHER; note = 2'-O-methylcytidine phosphorothioate
  modified_base 60: mod_base = OTHER; note = 2'-O-methylcytidine phosphorothioate
  modified_base 61: mod_base = OTHER; note = 2'-O-methyluridine phosphorothioate
  modified_base 62: mod_base = OTHER; note = 2'-O-methylguanosine phosphorothioate
  modified_base 63: mod_base = OTHER; note = 2'-O-methylcytidine
  misc_feature 1..51: note = RNA
  misc_feature 52..53: note = DNA
  misc_feature 54..63: note = RNA

SEQ ID NO: 241 - DNA, 63 bp, synthetic construct; identical to SEQ ID NO: 62
  source 1..63: mol_type = other DNA; note = Description of Artificial Sequence: Synthetic oligonucleotide; note = Description of Combined DNA/RNA Molecule: Synthetic oligonucleotide
  modified_base 1: mod_base = OTHER; note = 2'-O-methylguanosine phosphorothioate
  modified_base 2: mod_base = OTHER; note = 2'-O-methyluridine phosphorothioate
  modified_base 3: mod_base = OTHER; note = 2'-O-methylguanosine phosphorothioate
  modified_base 4: mod_base = OTHER; note = 2'-O-methylguanosine phosphorothioate
  modified_base 5: mod_base = OTHER; note = 2'-O-methyladenosine
  modified_base 6: mod_base = OTHER; note = 2'-O-methyladenosine
  modified_base 7: mod_base = OTHER; note = 2'-O-methyluridine
  modified_base 8: mod_base = OTHER; note = 2'-O-methyladenosine
  modified_base 9: mod_base = OTHER; note = 2'-O-methylguanosine
  modified_base 10: mod_base = OTHER; note = 2'-O-methyluridine
  modified_base 11: mod_base = OTHER; note = 2'-O-methyladenosine
  modified_base 12: mod_base = OTHER; note = 2'-O-methyluridine
  modified_base 13: mod_base = OTHER; note = 2'-O-methyladenosine
  modified_base 14: mod_base = OTHER; note = 2'-O-methyladenosine
  modified_base 15: mod_base = OTHER; note = 2'-O-methylcytidine
  modified_base 16: mod_base = OTHER; note = 2'-O-methyladenosine
  modified_base 17: mod_base = OTHER; note = 2'-O-methyladenosine
  modified_base 18: mod_base = OTHER; note = 2'-O-methyluridine
  modified_base 19: mod_base = OTHER; note = 2'-O-methyladenosine
  modified_base 20: mod_base = OTHER; note = 2'-O-methyluridine
  modified_base 21: mod_base = OTHER; note = 2'-O-methylguanosine
  modified_base 22: mod_base = OTHER; note = 2'-O-methylcytidine
  modified_base 23: mod_base = OTHER; note = 2'-O-methyluridine
  modified_base 24: mod_base = OTHER; note = 2'-O-methyladenosine
  modified_base 25: mod_base = OTHER; note = 2'-O-methyladenosine
  modified_base 26: mod_base = OTHER; note = 2'-O-methyladenosine
  modified_base 27: mod_base = OTHER; note = 2'-O-methyluridine
  modified_base 28: mod_base = OTHER; note = 2'-O-methylguanosine
  modified_base 29: mod_base = OTHER; note = 2'-O-methyluridine
  modified_base 30: mod_base = OTHER; note = 2'-O-methyluridine
  modified_base 31: mod_base = OTHER; note = 2'-O-methylguanosine
  modified_base 32: mod_base = OTHER; note = 2'-O-methyluridine
  modified_base 33: mod_base = OTHER; note = 2'-O-methyluridine
  modified_base 34: mod_base = OTHER; note = 2'-O-methyladenosine
  modified_base 35: mod_base = OTHER; note = 2'-O-methyluridine
  modified_base 36: mod_base = OTHER; note = 2'-O-methyladenosine
  modified_base 37: mod_base = OTHER; note = 2'-O-methylguanosine
  modified_base 38: mod_base = OTHER; note = 2'-O-methyluridine
  modified_base 39: mod_base = OTHER; note = 2'-O-methyladenosine
  modified_base 40: mod_base = OTHER; note = 2'-O-methyluridine
  modified_base 41: mod_base = OTHER; note = 2'-O-methylcytidine
  modified_base 42: mod_base = OTHER; note = 2'-O-methylcytidine
  modified_base 43: mod_base = OTHER; note = 2'-O-methylcytidine
  modified_base 44: mod_base = OTHER; note = 2'-O-methyladenosine
  modified_base 45: mod_base = OTHER; note = 2'-O-methylcytidine
  modified_base 46: mod_base = OTHER; note = 2'-O-methylcytidine
  modified_base 47: mod_base = OTHER; note = 2'-O-methyladenosine
  modified_base 48: mod_base = OTHER; note = 2'-O-methylguanosine
  modified_base 49: mod_base = OTHER; note = 2'-O-methylcytidine
  modified_base 50: mod_base = OTHER; note = 2'-O-methyluridine
  modified_base 51: mod_base = OTHER; note = 2'-O-methyluridine
  modified_base 52: mod_base = OTHER; note = Beta-D-hexitol thymidine
  modified_base 55: mod_base = OTHER; note = 2'-O-methyladenosine
  modified_base 56: mod_base = OTHER; note = 2'-O-methylcytidine
  modified_base 57: mod_base = OTHER; note = 2'-O-methyluridine
  modified_base 58: mod_base = OTHER; note = 2'-O-methyluridine
  modified_base 59: mod_base = OTHER; note = 2'-O-methylcytidine phosphorothioate
  modified_base 60: mod_base = OTHER; note = 2'-O-methylcytidine phosphorothioate
  modified_base 61: mod_base = OTHER; note = 2'-O-methyluridine phosphorothioate
  modified_base 62: mod_base = OTHER; note = 2'-O-methylguanosine phosphorothioate
  modified_base 63: mod_base = OTHER; note = 2'-O-methylcytidine
  misc_feature 1..52: note = RNA
  misc_feature 53..54: note = DNA
  misc_feature 55..63: note = RNA

SEQ ID NO: 242 - DNA, 63 bp, synthetic construct; identical to SEQ ID NO: 62
  source 1..63: mol_type = other DNA; note = Description of Artificial Sequence: Synthetic oligonucleotide; note = Description of Combined DNA/RNA Molecule: Synthetic oligonucleotide
  modified_base 1: mod_base = OTHER; note = 2'-O-methylguanosine phosphorothioate
  modified_base 2: mod_base = OTHER; note = 2'-O-methyluridine phosphorothioate
  modified_base 3: mod_base = OTHER; note = 2'-O-methylguanosine phosphorothioate
  modified_base 4: mod_base = OTHER; note = 2'-O-methylguanosine phosphorothioate
  modified_base 5: mod_base = OTHER; note = 2'-O-methyladenosine
  modified_base 6: mod_base = OTHER; note = 2'-O-methyladenosine
  modified_base 7: mod_base = OTHER; note = 2'-O-methyluridine
  modified_base 8: mod_base = OTHER; note = 2'-O-methyladenosine
  modified_base 9: mod_base = OTHER; note = 2'-O-methylguanosine
  modified_base 10: mod_base = OTHER; note = 2'-O-methyluridine
  modified_base 11: mod_base = OTHER; note = 2'-O-methyladenosine
  modified_base 12: mod_base = OTHER; note = 2'-O-methyluridine
  modified_base 13: mod_base = OTHER; note = 2'-O-methyladenosine
  modified_base 14: mod_base = OTHER; note = 2'-O-methyladenosine
  modified_base 15: mod_base = OTHER; note = 2'-O-methylcytidine
  modified_base 16: mod_base = OTHER; note = 2'-O-methyladenosine
  modified_base 17: mod_base = OTHER; note = 2'-O-methyladenosine
  modified_base 18: mod_base = OTHER; note = 2'-O-methyluridine
  modified_base 19: mod_base = OTHER; note = 2'-O-methyladenosine
  modified_base 20: mod_base = OTHER; note = 2'-O-methyluridine
  modified_base 21: mod_base = OTHER; note = 2'-O-methylguanosine
  modified_base 22: mod_base = OTHER; note = 2'-O-methylcytidine
  modified_base 23: mod_base = OTHER; note = 2'-O-methyluridine
  modified_base 24: mod_base = OTHER; note = 2'-O-methyladenosine
  modified_base 25: mod_base = OTHER; note = 2'-O-methyladenosine
  modified_base 26: mod_base = OTHER; note = 2'-O-methyladenosine
  modified_base 27: mod_base = OTHER; note = 2'-O-methyluridine
  modified_base 28: mod_base = OTHER; note = 2'-O-methylguanosine
  modified_base 29: mod_base = OTHER; note = 2'-O-methyluridine
  modified_base 30: mod_base = OTHER; note = 2'-O-methyluridine
  modified_base 31: mod_base = OTHER; note = 2'-O-methylguanosine
  modified_base 32: mod_base = OTHER; note = 2'-O-methyluridine
  modified_base 33: mod_base = OTHER; note = 2'-O-methyluridine
  modified_base 34: mod_base = OTHER; note = 2'-O-methyladenosine
  modified_base 35: mod_base = OTHER; note = 2'-O-methyluridine
  modified_base 36: mod_base = OTHER; note = 2'-O-methyladenosine
  modified_base 37: mod_base = OTHER; note = 2'-O-methylguanosine
  modified_base 38: mod_base = OTHER; note = 2'-O-methyluridine
  modified_base 39: mod_base = OTHER; note = 2'-O-methyladenosine
  modified_base 40: mod_base = OTHER; note = 2'-O-methyluridine
  modified_base 41: mod_base = OTHER; note = 2'-O-methylcytidine
  modified_base 42: mod_base = OTHER; note = 2'-O-methylcytidine
  modified_base 43: mod_base = OTHER; note = 2'-O-methylcytidine
  modified_base 44: mod_base = OTHER; note = 2'-O-methyladenosine
  modified_base 45: mod_base = OTHER; note = 2'-O-methylcytidine
  modified_base 46: mod_base = OTHER; note = 2'-O-methylcytidine
  modified_base 47: mod_base = OTHER; note = 2'-O-methyladenosine
  modified_base 48: mod_base = OTHER; note = 2'-O-methylguanosine
  modified_base 49: mod_base = OTHER; note = 2'-O-methylcytidine
  modified_base 50: mod_base = OTHER; note = 2'-O-methyluridine
  modified_base 51: mod_base = OTHER; note = 2'-O-methyluridine
  modified_base 53: mod_base = OTHER; note = Beta-D-hexitol cytidine
  modified_base 55: mod_base = OTHER; note = 2'-O-methyladenosine
  modified_base 56: mod_base = OTHER; note = 2'-O-methylcytidine
  modified_base 57: mod_base = OTHER; note = 2'-O-methyluridine
  modified_base 58: mod_base = OTHER; note = 2'-O-methyluridine
  modified_base 59: mod_base = OTHER; note = 2'-O-methylcytidine phosphorothioate
  modified_base 60: mod_base = OTHER; note = 2'-O-methylcytidine phosphorothioate
  modified_base 61: mod_base = OTHER; note = 2'-O-methyluridine phosphorothioate
  modified_base 62: mod_base = OTHER; note = 2'-O-methylguanosine phosphorothioate
  modified_base 63: mod_base = OTHER; note = 2'-O-methylcytidine
  misc_feature 1..51: note = RNA
  misc_feature 52: note = DNA
  misc_feature 53: note = RNA
  misc_feature 54: note = DNA
  misc_feature 55..63: note = RNA

SEQ ID NO: 243 - DNA, 63 bp, synthetic construct; identical to SEQ ID NO: 62
  source 1..63: mol_type = other DNA; note = Description of Artificial Sequence: Synthetic oligonucleotide; note = Description of Combined DNA/RNA Molecule: Synthetic oligonucleotide
  modified_base 1: mod_base = OTHER; note = 2'-O-methylguanosine phosphorothioate
  modified_base 2: mod_base = OTHER; note = 2'-O-methyluridine phosphorothioate
  modified_base 3: mod_base = OTHER; note = 2'-O-methylguanosine phosphorothioate
  modified_base 4: mod_base = OTHER; note = 2'-O-methylguanosine phosphorothioate
  modified_base 5: mod_base = OTHER; note = 2'-O-methyladenosine
  modified_base 6: mod_base = OTHER; note = 2'-O-methyladenosine
  modified_base 7: mod_base = OTHER; note = 2'-O-methyluridine
  modified_base 8: mod_base = OTHER; note = 2'-O-methyladenosine
  modified_base 9: mod_base = OTHER; note = 2'-O-methylguanosine
  modified_base 10: mod_base = OTHER; note = 2'-O-methyluridine
  modified_base 11: mod_base = OTHER; note = 2'-O-methyladenosine
  modified_base 12: mod_base = OTHER; note = 2'-O-methyluridine
  modified_base 13: mod_base = OTHER; note = 2'-O-methyladenosine
  modified_base 14: mod_base = OTHER; note = 2'-O-methyladenosine
  modified_base 15: mod_base = OTHER; note = 2'-O-methylcytidine
  modified_base 16: mod_base = OTHER; note = 2'-O-methyladenosine
  modified_base 17: mod_base = OTHER; note = 2'-O-methyladenosine
  modified_base 18: mod_base = OTHER; note = 2'-O-methyluridine
  modified_base 19: mod_base = OTHER; note = 2'-O-methyladenosine
  modified_base 20: mod_base = OTHER; note = 2'-O-methyluridine
  modified_base 21: mod_base = OTHER; note = 2'-O-methylguanosine
  modified_base 22: mod_base = OTHER; note = 2'-O-methylcytidine
  modified_base 23: mod_base = OTHER; note = 2'-O-methyluridine
  modified_base 24: mod_base = OTHER; note = 2'-O-methyladenosine
  modified_base 25: mod_base = OTHER; note = 2'-O-methyladenosine
  modified_base 26: mod_base = OTHER; note = 2'-O-methyladenosine
  modified_base 27: mod_base = OTHER; note = 2'-O-methyluridine
  modified_base 28: mod_base = OTHER; note = 2'-O-methylguanosine
  modified_base 29: mod_base = OTHER; note = 2'-O-methyluridine
  modified_base 30: mod_base = OTHER; note = 2'-O-methyluridine
  modified_base 31: mod_base = OTHER; note = 2'-O-methylguanosine
  modified_base 32: mod_base = OTHER; note = 2'-O-methyluridine
  modified_base 33: mod_base = OTHER; note = 2'-O-methyluridine
  modified_base 34: mod_base = OTHER; note = 2'-O-methyladenosine
  modified_base 35: mod_base = OTHER; note = 2'-O-methyluridine
  modified_base 36: mod_base = OTHER; note = 2'-O-methyladenosine
  modified_base 37: mod_base = OTHER; note = 2'-O-methylguanosine
  modified_base 38: mod_base = OTHER; note = 2'-O-methyluridine
  modified_base 39: mod_base = OTHER; note = 2'-O-methyladenosine
  modified_base 40: mod_base = OTHER; note = 2'-O-methyluridine
  modified_base 41: mod_base = OTHER; note = 2'-O-methylcytidine
  modified_base 42: mod_base = OTHER; note = 2'-O-methylcytidine
  modified_base 43: mod_base = OTHER; note = 2'-O-methylcytidine
  modified_base 44: mod_base = OTHER; note = 2'-O-methyladenosine
  modified_base 45: mod_base = OTHER; note = 2'-O-methylcytidine
  modified_base 46: mod_base = OTHER; note = 2'-O-methylcytidine
  modified_base 47: mod_base = OTHER; note = 2'-O-methyladenosine
  modified_base 48: mod_base = OTHER; note = 2'-O-methylguanosine
  modified_base 49: mod_base = OTHER; note = 2'-O-methylcytidine
  modified_base 50: mod_base = OTHER; note = 2'-O-methyluridine
  modified_base 51: mod_base = OTHER; note = 2'-O-methyluridine
  modified_base 54: mod_base = OTHER; note = Beta-D-hexitol cytidine
  modified_base 55: mod_base = OTHER; note = 2'-O-methyladenosine
  modified_base 56: mod_base = OTHER; note = 2'-O-methylcytidine
  modified_base 57: mod_base = OTHER; note = 2'-O-methyluridine
  modified_base 58: mod_base = OTHER; note = 2'-O-methyluridine
  modified_base 59: mod_base = OTHER; note = 2'-O-methylcytidine phosphorothioate
  modified_base 60: mod_base = OTHER; note = 2'-O-methylcytidine phosphorothioate
  modified_base 61: mod_base = OTHER; note = 2'-O-methyluridine phosphorothioate
  modified_base 62: mod_base = OTHER; note = 2'-O-methylguanosine phosphorothioate
  modified_base 63: mod_base = OTHER; note = 2'-O-methylcytidine
  misc_feature 1..51: note = RNA
  misc_feature 52..53: note = DNA
  misc_feature 54..63: note = RNA

SEQ ID NO: 244 - DNA, 63 bp, synthetic construct
  source 1..63: mol_type = other DNA; note = Description of Artificial Sequence: Synthetic oligonucleotide; note = Description of Combined DNA/RNA Molecule: Synthetic oligonucleotide
  modified_base 1: mod_base = OTHER; note = 2'-O-methylguanosine phosphorothioate
  modified_base 2: mod_base = OTHER; note = 2'-O-methyluridine phosphorothioate
  modified_base 3: mod_base = OTHER; note = 2'-O-methylguanosine phosphorothioate
  modified_base 4: mod_base = OTHER; note = 2'-O-methylguanosine phosphorothioate
  modified_base 5: mod_base = OTHER; note = 2'-O-methyladenosine
  modified_base 6: mod_base = OTHER; note = 2'-O-methyladenosine
  modified_base 7: mod_base = OTHER; note = 2'-O-methyluridine
  modified_base 8: mod_base = OTHER; note = 2'-O-methyladenosine
  modified_base 9: mod_base = OTHER; note = 2'-O-methylguanosine
  modified_base 10: mod_base = OTHER; note = 2'-O-methyluridine
  modified_base 11: mod_base = OTHER; note = 2'-O-methyladenosine
  modified_base 12: mod_base = OTHER; note = 2'-O-methyluridine
  modified_base 13: mod_base = OTHER; note = 2'-O-methyladenosine
  modified_base 14: mod_base = OTHER; note = 2'-O-methyladenosine
  modified_base 15: mod_base = OTHER; note = 2'-O-methylcytidine
  modified_base 16: mod_base = OTHER; note = 2'-O-methyladenosine
  modified_base 17: mod_base = OTHER; note = 2'-O-methyladenosine
  modified_base 18: mod_base = OTHER; note = 2'-O-methyluridine
  modified_base 19: mod_base = OTHER; note = 2'-O-methyladenosine
  modified_base 20: mod_base = OTHER; note = 2'-O-methyluridine
  modified_base 21: mod_base = OTHER; note = 2'-O-methylguanosine
  modified_base 22: mod_base = OTHER; note = 2'-O-methylcytidine
  modified_base 23: mod_base = OTHER; note = 2'-O-methyluridine
  modified_base 24: mod_base = OTHER; note = 2'-O-methyladenosine
  modified_base 25: mod_base = OTHER; note = 2'-O-methyladenosine
  modified_base 26: mod_base = OTHER; note = 2'-O-methyladenosine
  modified_base 27: mod_base = OTHER; note = 2'-O-methyluridine
  modified_base 28: mod_base = OTHER; note = 2'-O-methylguanosine
  modified_base 29: mod_base = OTHER; note = 2'-O-methyluridine
  modified_base 30: mod_base = OTHER; note = 2'-O-methyluridine
  modified_base 31: mod_base = OTHER; note = 2'-O-methylguanosine
  modified_base 32: mod_base = OTHER; note = 2'-O-methyluridine
  modified_base 33: mod_base = OTHER; note = 2'-O-methyluridine
  modified_base 34: mod_base = OTHER; note = 2'-O-methyladenosine
  modified_base 35: mod_base = OTHER; note = 2'-O-methyluridine
  modified_base 36: mod_base = OTHER; note = 2'-O-methyladenosine
  modified_base 37: mod_base = OTHER; note = 2'-O-methylguanosine
  modified_base 38: mod_base = OTHER; note = 2'-O-methyluridine
  modified_base 39: mod_base = OTHER; note = 2'-O-methyladenosine
  modified_base 40: mod_base = OTHER; note = 2'-O-methyluridine
  modified_base 41: mod_base = OTHER; note = 2'-O-methylcytidine
  modified_base 42: mod_base = OTHER; note = 2'-O-methylcytidine
  modified_base 43: mod_base = OTHER; note = 2'-O-methylcytidine
  modified_base 44: mod_base = OTHER; note = 2'-O-methyladenosine
  modified_base 45: mod_base = OTHER; note = 2'-O-methylcytidine
  modified_base 46: mod_base = OTHER; note = 2'-O-methylcytidine
  modified_base 47: mod_base = OTHER; note = 2'-O-methyladenosine
  modified_base 48: mod_base = OTHER; note = 2'-O-methylguanosine
  modified_base 49: mod_base = OTHER; note = 2'-O-methylcytidine
  modified_base 50: mod_base = OTHER; note = 2'-O-methyluridine
  modified_base 51: mod_base = OTHER; note = 2'-O-methyluridine
  modified_base 52: mod_base = OTHER; note = Inosine
  modified_base 55: mod_base = OTHER; note = 2'-O-methyladenosine
  modified_base 56: mod_base = OTHER; note = 2'-O-methylcytidine
  modified_base 57: mod_base = OTHER; note = 2'-O-methyluridine
  modified_base 58: mod_base = OTHER; note = 2'-O-methyluridine
  modified_base 59: mod_base = OTHER; note = 2'-O-methylcytidine phosphorothioate
  modified_base 60: mod_base = OTHER; note = 2'-O-methylcytidine phosphorothioate
  modified_base 61: mod_base = OTHER; note = 2'-O-methyluridine phosphorothioate
  modified_base 62: mod_base = OTHER; note = 2'-O-methylguanosine phosphorothioate
  modified_base 63: mod_base = OTHER; note = 2'-O-methylcytidine
  misc_feature 1..51: note = RNA
  misc_feature 52..54: note = DNA
  misc_feature 55..63: note = RNA
gtggaatagtataacaatatgctaaatgttgttatagtatcccaccagcttnccacttcctgc

SEQ ID NO: 245 - DNA, 63 bp, synthetic construct; identical to SEQ ID NO: 226
  source 1..63: mol_type = other DNA; note = Description of Artificial Sequence: Synthetic oligonucleotide; note = Description of Combined DNA/RNA Molecule: Synthetic oligonucleotide
  modified_base 1: mod_base = OTHER; note = 2'-O-methylguanosine phosphorothioate
  modified_base 2: mod_base = OTHER; note = 2'-O-methyluridine phosphorothioate
  modified_base 3: mod_base = OTHER; note = 2'-O-methylguanosine phosphorothioate
  modified_base 4: mod_base = OTHER; note = 2'-O-methylguanosine phosphorothioate
  modified_base 5: mod_base = OTHER; note = 2'-O-methyladenosine
  modified_base 6: mod_base = OTHER; note = 2'-O-methyladenosine
  modified_base 7: mod_base = OTHER; note = 2'-O-methyluridine
  modified_base 8: mod_base = OTHER; note = 2'-O-methyladenosine
  modified_base 9: mod_base = OTHER; note = 2'-O-methylguanosine
  modified_base 10: mod_base = OTHER; note = 2'-O-methyluridine
  modified_base 11: mod_base = OTHER; note = 2'-O-methyladenosine
  modified_base 12: mod_base = OTHER; note = 2'-O-methyluridine
  modified_base 13: mod_base = OTHER; note = 2'-O-methyladenosine
  modified_base 14: mod_base = OTHER; note = 2'-O-methyladenosine
  modified_base 15: mod_base = OTHER; note = 2'-O-methylcytidine
  modified_base 16: mod_base = OTHER; note = 2'-O-methyladenosine
  modified_base 17: mod_base = OTHER; note = 2'-O-methyladenosine
  modified_base 18: mod_base = OTHER; note = 2'-O-methyluridine
  modified_base 19: mod_base = OTHER; note = 2'-O-methyladenosine
  modified_base 20: mod_base = OTHER; note = 2'-O-methyluridine
  modified_base 21: mod_base = OTHER; note = 2'-O-methylguanosine
  modified_base 22: mod_base = OTHER; note = 2'-O-methylcytidine
  modified_base 23: mod_base = OTHER; note = 2'-O-methyluridine
  modified_base 24: mod_base = OTHER; note = 2'-O-methyladenosine
  modified_base 25: mod_base = OTHER; note = 2'-O-methyladenosine
  modified_base 26: mod_base = OTHER; note = 2'-O-methyladenosine
  modified_base 27: mod_base = OTHER; note = 2'-O-methyluridine
  modified_base 28: mod_base = OTHER; note = 2'-O-methylguanosine
  modified_base 29: mod_base = OTHER; note = 2'-O-methyluridine
  modified_base 30: mod_base = OTHER; note = 2'-O-methyluridine
  modified_base 31: mod_base = OTHER; note = 2'-O-methylguanosine
  modified_base 32: mod_base = OTHER; note = 2'-O-methyluridine
  modified_base 33: mod_base = OTHER; note = 2'-O-methyluridine
  modified_base 34: mod_base = OTHER; note = 2'-O-methyladenosine
  modified_base 35: mod_base = OTHER; note = 2'-O-methyluridine
  modified_base 36: mod_base = OTHER; note = 2'-O-methyladenosine
  modified_base 37: mod_base = OTHER; note = 2'-O-methylguanosine
  modified_base 38: mod_base = OTHER; note = 2'-O-methyluridine
  modified_base 39: mod_base = OTHER; note = 2'-O-methyladenosine
  modified_base 40: mod_base = OTHER; note = 2'-O-methyluridine
  modified_base 41: mod_base = OTHER; note = 2'-O-methylcytidine
  modified_base 42: mod_base = OTHER; note = 2'-O-methylcytidine
  modified_base 43: mod_base = OTHER; note = 2'-O-methylcytidine
  modified_base 44: mod_base = OTHER; note = 2'-O-methyladenosine
  modified_base 45: mod_base = OTHER; note = 2'-O-methylcytidine
  modified_base 46: mod_base = OTHER; note = 2'-O-methylcytidine
  modified_base 47: mod_base = OTHER; note = 2'-O-methyladenosine
  modified_base 48: mod_base = OTHER; note = 2'-O-methylguanosine
  modified_base 49: mod_base = OTHER; note = 2'-O-methylcytidine
  modified_base 50: mod_base = OTHER; note = 2'-O-methyluridine
  modified_base 51: mod_base = OTHER; note = 2'-O-methyluridine
  modified_base 53: mod_base = OTHER; note = Inosine
  modified_base 55: mod_base = OTHER; note = 2'-O-methyladenosine
  modified_base 56: mod_base = OTHER; note = 2'-O-methylcytidine
  modified_base 57: mod_base = OTHER; note = 2'-O-methyluridine
  modified_base 58: mod_base = OTHER; note = 2'-O-methyluridine
  modified_base 59: mod_base = OTHER; note = 2'-O-methylcytidine phosphorothioate
  modified_base 60: mod_base = OTHER; note = 2'-O-methylcytidine phosphorothioate
  modified_base 61: mod_base = OTHER; note = 2'-O-methyluridine phosphorothioate
  modified_base 62: mod_base = OTHER; note = 2'-O-methylguanosine phosphorothioate
  modified_base 63: mod_base = OTHER; note = 2'-O-methylcytidine
  misc_feature 1..51: note = RNA
  misc_feature 52..54: note = DNA
  misc_feature 55..63: note = RNA

SEQ ID NO: 246 - DNA, 63 bp, synthetic construct
  source 1..63: mol_type = other DNA; note = Description of Artificial Sequence: Synthetic oligonucleotide; note = Description of Combined DNA/RNA Molecule: Synthetic oligonucleotide
  modified_base 1: mod_base = OTHER; note = 2'-O-methylguanosine phosphorothioate
  modified_base 2: mod_base = OTHER; note = 2'-O-methyluridine phosphorothioate
  modified_base 3: mod_base = OTHER; note = 2'-O-methylguanosine phosphorothioate
  modified_base 4: mod_base = OTHER; note = 2'-O-methylguanosine phosphorothioate
  modified_base 5: mod_base = OTHER; note = 2'-O-methyladenosine
  modified_base 6: mod_base = OTHER; note = 2'-O-methyladenosine
  modified_base 7: mod_base = OTHER; note = 2'-O-methyluridine
  modified_base 8: mod_base = OTHER; note = 2'-O-methyladenosine
  modified_base 9: mod_base = OTHER; note = 2'-O-methylguanosine
  modified_base 10: mod_base = OTHER; note = 2'-O-methyluridine
  modified_base 11: mod_base = OTHER; note = 2'-O-methyladenosine
  modified_base 12: mod_base = OTHER; note = 2'-O-methyluridine
  modified_base 13: mod_base = OTHER; note = 2'-O-methyladenosine
  modified_base 14: mod_base = OTHER; note = 2'-O-methyladenosine
  modified_base 15: mod_base = OTHER; note = 2'-O-methylcytidine
  modified_base 16: mod_base = OTHER; note = 2'-O-methyladenosine
  modified_base 17: mod_base = OTHER; note = 2'-O-methyladenosine
  modified_base 18: mod_base = OTHER; note = 2'-O-methyluridine
  modified_base 19: mod_base = OTHER; note = 2'-O-methyladenosine
  modified_base 20: mod_base = OTHER; note = 2'-O-methyluridine
  modified_base 21: mod_base = OTHER; note = 2'-O-methylguanosine
  modified_base 22: mod_base = OTHER; note = 2'-O-methylcytidine
  modified_base 23: mod_base = OTHER; note = 2'-O-methyluridine
  modified_base 24: mod_base = OTHER; note = 2'-O-methyladenosine
  modified_base 25: mod_base = OTHER; note = 2'-O-methyladenosine
  modified_base 26: mod_base = OTHER; note = 2'-O-methyladenosine
  modified_base 27: mod_base = OTHER; note = 2'-O-methyluridine
  modified_base 28: mod_base = OTHER; note = 2'-O-methylguanosine
  modified_base 29: mod_base = OTHER; note = 2'-O-methyluridine
  modified_base 30: mod_base = OTHER; note = 2'-O-methyluridine
  modified_base 31: mod_base = OTHER; note = 2'-O-methylguanosine
  modified_base 32: mod_base = OTHER; note = 2'-O-methyluridine
  modified_base 33: mod_base = OTHER; note = 2'-O-methyluridine
  modified_base 34: mod_base = OTHER; note = 2'-O-methyladenosine
  modified_base 35: mod_base = OTHER; note = 2'-O-methyluridine
  modified_base 36: mod_base = OTHER; note = 2'-O-methyladenosine
  modified_base 37: mod_base = OTHER; note = 2'-O-methylguanosine
  modified_base 38: mod_base = OTHER; note = 2'-O-methyluridine
  modified_base 39: mod_base = OTHER; note = 2'-O-methyladenosine
  modified_base 40: mod_base = OTHER; note = 2'-O-methyluridine
  modified_base 41: mod_base = OTHER; note = 2'-O-methylcytidine
  modified_base 42: mod_base = OTHER; note = 2'-O-methylcytidine
  modified_base 43: mod_base = OTHER; note = 2'-O-methylcytidine
  modified_base 44: mod_base = OTHER; note = 2'-O-methyladenosine
  modified_base 45: mod_base = OTHER; note = 2'-O-methylcytidine
  modified_base 46: mod_base = OTHER; note = 2'-O-methylcytidine
  modified_base 47: mod_base = OTHER; note = 2'-O-methyladenosine
  modified_base 48: mod_base = OTHER; note = 2'-O-methylguanosine
  modified_base 49: mod_base = OTHER; note = 2'-O-methylcytidine
  modified_base 50: mod_base = OTHER; note = 2'-O-methyluridine
  modified_base 51: mod_base = OTHER; note = 2'-O-methyluridine
  modified_base 54: mod_base = OTHER; note = Inosine
  modified_base 55: mod_base = OTHER; note = 2'-O-methyladenosine
  modified_base 56: mod_base = OTHER; note = 2'-O-methylcytidine
  modified_base 57: mod_base = OTHER; note = 2'-O-methyluridine
  modified_base 58: mod_base = OTHER; note = 2'-O-methyluridine
  modified_base 59: mod_base = OTHER; note = 2'-O-methylcytidine phosphorothioate
  modified_base 60: mod_base = OTHER; note = 2'-O-methylcytidine phosphorothioate
  modified_base 61: mod_base = OTHER; note = 2'-O-methyluridine phosphorothioate
  modified_base 62: mod_base = OTHER; note = 2'-O-methylguanosine phosphorothioate
  modified_base 63: mod_base = OTHER; note = 2'-O-methylcytidine
  misc_feature 1..51: note = RNA
  misc_feature 52..54: note = DNA
  misc_feature 55..63: note = RNA
gtggaatagtataacaatatgctaaatgttgttatagtatcccaccagctttcnacttcctgc

SEQ ID NO: 247 - DNA, 63 bp, synthetic construct
  source 1..63: mol_type = other DNA; note = Description of Artificial Sequence: Synthetic oligonucleotide; note = Description of Combined DNA/RNA Molecule: Synthetic oligonucleotide
  modified_base 1: mod_base = OTHER; note = 2'-O-methylguanosine phosphorothioate
  modified_base 2: mod_base = OTHER; note = 2'-O-methyluridine phosphorothioate
  modified_base 3: mod_base = OTHER; note = 2'-O-methylguanosine phosphorothioate
  modified_base 4: mod_base = OTHER; note = 2'-O-methylguanosine phosphorothioate
  modified_base 5: mod_base = OTHER; note = 2'-O-methyladenosine
  modified_base 6: mod_base = OTHER; note = 2'-O-methyladenosine
  modified_base 7: mod_base = OTHER; note = 2'-O-methyluridine
  modified_base 8: mod_base = OTHER; note = 2'-O-methyladenosine
  modified_base 9: mod_base = OTHER; note = 2'-O-methylguanosine
  modified_base 10: mod_base = OTHER; note = 2'-O-methyluridine
  modified_base 11: mod_base = OTHER; note = 2'-O-methyladenosine
  modified_base 12: mod_base = OTHER; note = 2'-O-methyluridine
  modified_base 13: mod_base = OTHER; note = 2'-O-methyladenosine
  modified_base 14: mod_base = OTHER; note = 2'-O-methyladenosine
  modified_base 15: mod_base = OTHER; note = 2'-O-methylcytidine
  modified_base 16: mod_base = OTHER; note = 2'-O-methyladenosine
  modified_base 17: mod_base = OTHER; note = 2'-O-methyladenosine
  modified_base 18: mod_base = OTHER; note = 2'-O-methyluridine
  modified_base 19: mod_base = OTHER; note = 2'-O-methyladenosine
  modified_base 20: mod_base = OTHER; note = 2'-O-methyluridine
  modified_base 21: mod_base = OTHER; note = 2'-O-methylguanosine
  modified_base 22: mod_base = OTHER; note = 2'-O-methylcytidine
  modified_base 23: mod_base = OTHER; note = 2'-O-methyluridine
  modified_base 24: mod_base = OTHER; note = 2'-O-methyladenosine
  modified_base 25: mod_base = OTHER; note = 2'-O-methyladenosine
  modified_base 26: mod_base = OTHER; note = 2'-O-methyladenosine
  modified_base 27: mod_base = OTHER; note = 2'-O-methyluridine
  modified_base 28: mod_base = OTHER; note = 2'-O-methylguanosine
  modified_base 29: mod_base = OTHER; note = 2'-O-methyluridine
  modified_base 30: mod_base = OTHER; note = 2'-O-methyluridine
  modified_base 31: mod_base = OTHER; note = 2'-O-methylguanosine
  modified_base 32: mod_base = OTHER; note = 2'-O-methyluridine
  modified_base 33: mod_base = OTHER; note = 2'-O-methyluridine
  modified_base 34: mod_base = OTHER; note = 2'-O-methyladenosine
  modified_base 35: mod_base = OTHER; note = 2'-O-methyluridine
  modified_base 36: mod_base = OTHER; note = 2'-O-methyladenosine
  modified_base 37: mod_base = OTHER; note = 2'-O-methylguanosine
  modified_base 38: mod_base = OTHER; note = 2'-O-methyluridine
  modified_base 39: mod_base = OTHER; note = 2'-O-methyladenosine
  modified_base 40: mod_base = OTHER; note = 2'-O-methyluridine
  modified_base 41: mod_base = OTHER; note = 2'-O-methylcytidine
  modified_base 42: mod_base = OTHER; note = 2'-O-methylcytidine
  modified_base 43: mod_base = OTHER; note = 2'-O-methylcytidine
  modified_base 44: mod_base = OTHER; note = 2'-O-methyladenosine
  modified_base 45: mod_base = OTHER; note = 2'-O-methylcytidine
  modified_base 46: mod_base = OTHER; note = 2'-O-methylcytidine
  modified_base 47: mod_base = OTHER; note = 2'-O-methyladenosine
  modified_base 48: mod_base = OTHER; note = 2'-O-methylguanosine
  modified_base 49: mod_base = OTHER; note = 2'-O-methylcytidine
  modified_base 50: mod_base = OTHER; note = 2'-O-methyluridine
  modified_base 51: mod_base = OTHER; note = 2'-O-methyluridine
  modified_base 52: mod_base = OTHER; note = Inosine
  modified_base 53: mod_base = OTHER; note = Inosine
  modified_base 55: mod_base = OTHER; note = 2'-O-methyladenosine
  modified_base 56: mod_base = OTHER; note = 2'-O-methylcytidine
  modified_base 57: mod_base = OTHER; note = 2'-O-methyluridine
  modified_base 58: mod_base = OTHER; note = 2'-O-methyluridine
  modified_base 59: mod_base = OTHER; note = 2'-O-methylcytidine phosphorothioate
  modified_base 60: mod_base = OTHER; note = 2'-O-methylcytidine phosphorothioate
  modified_base 61: mod_base = OTHER; note = 2'-O-methyluridine phosphorothioate
  modified_base 62: mod_base = OTHER; note = 2'-O-methylguanosine phosphorothioate
  modified_base 63: mod_base = OTHER; note = 2'-O-methylcytidine
  misc_feature 1..51: note = RNA
  misc_feature 52..54: note = DNA
  misc_feature 55..63: note = RNA
gtggaatagtataacaatatgctaaatgttgttatagtatcccaccagcttnncacttcctgc

SEQ ID NO: 248 - DNA, 63 bp, synthetic construct
  source 1..63: mol_type = other DNA; note = Description of Artificial Sequence: Synthetic oligonucleotide; note = Description of Combined DNA/RNA Molecule: Synthetic oligonucleotide
  modified_base 1: mod_base = OTHER; note = 2'-O-methylguanosine phosphorothioate
  modified_base 2: mod_base = OTHER; note = 2'-O-methyluridine phosphorothioate
  modified_base 3: mod_base = OTHER; note = 2'-O-methylguanosine phosphorothioate
  modified_base 4: mod_base = OTHER; note = 2'-O-methylguanosine phosphorothioate
  modified_base 5: mod_base = OTHER; note = 2'-O-methyladenosine
  modified_base 6: mod_base = OTHER; note = 2'-O-methyladenosine
  modified_base 7: mod_base = OTHER; note = 2'-O-methyluridine
  modified_base 8: mod_base = OTHER; note = 2'-O-methyladenosine
  modified_base 9: mod_base = OTHER; note = 2'-O-methylguanosine
  modified_base 10: mod_base = OTHER; note = 2'-O-methyluridine
  modified_base 11: mod_base = OTHER; note = 2'-O-methyladenosine
  modified_base 12: mod_base = OTHER; note = 2'-O-methyluridine
  modified_base 13: mod_base = OTHER; note = 2'-O-methyladenosine
  modified_base 14: mod_base = OTHER; note = 2'-O-methyladenosine
  modified_base 15: mod_base = OTHER; note = 2'-O-methylcytidine
  modified_base 16: mod_base = OTHER; note = 2'-O-methyladenosine
  modified_base 17: mod_base = OTHER; note = 2'-O-methyladenosine
  modified_base 18: mod_base = OTHER; note = 2'-O-methyluridine
  modified_base 19: mod_base = OTHER; note = 2'-O-methyladenosine
  modified_base 20: mod_base = OTHER; note = 2'-O-methyluridine
  modified_base 21: mod_base = OTHER; note = 2'-O-methylguanosine
  modified_base 22: mod_base = OTHER; note = 2'-O-methylcytidine
  modified_base 23: mod_base = OTHER; note = 2'-O-methyluridine
  modified_base 24: mod_base = OTHER; note = 2'-O-methyladenosine
  modified_base 25: mod_base = OTHER; note = 2'-O-methyladenosine
  modified_base 26: mod_base = OTHER; note = 2'-O-methyladenosine
  modified_base 27: mod_base = OTHER; note = 2'-O-methyluridine
  modified_base 28: mod_base = OTHER; note = 2'-O-methylguanosine
  modified_base 29: mod_base = OTHER; note = 2'-O-methyluridine
  modified_base 30: mod_base = OTHER; note = 2'-O-methyluridine
  modified_base 31: mod_base = OTHER; note = 2'-O-methylguanosine
  modified_base 32: mod_base = OTHER; note = 2'-O-methyluridine
  modified_base 33: mod_base = OTHER; note = 2'-O-methyluridine
  modified_base 34: mod_base = OTHER; note = 2'-O-methyladenosine
  modified_base 35: mod_base = OTHER; note = 2'-O-methyluridine
  modified_base 36: mod_base = OTHER; note = 2'-O-methyladenosine
  modified_base 37: mod_base = OTHER; note = 2'-O-methylguanosine
  modified_base 38: mod_base = OTHER; note = 2'-O-methyluridine
  modified_base 39: mod_base = OTHER; note = 2'-O-methyladenosine
  modified_base 40: mod_base = OTHER; note = 2'-O-methyluridine
  modified_base 41: mod_base = OTHER; note = 2'-O-methylcytidine
  modified_base 42: mod_base = OTHER; note = 2'-O-methylcytidine
  modified_base 43: mod_base = OTHER; note = 2'-O-methylcytidine
  modified_base 44: mod_base = OTHER; note = 2'-O-methyladenosine
  modified_base 45: mod_base = OTHER; note = 2'-O-methylcytidine
  modified_base 46: mod_base = OTHER; note = 2'-O-methylcytidine
  modified_base 47: mod_base = OTHER; note = 2'-O-methyladenosine
  modified_base 48: mod_base = OTHER; note = 2'-O-methylguanosine
  modified_base 49: mod_base = OTHER; note = 2'-O-methylcytidine
  modified_base 50: mod_base = OTHER; note = 2'-O-methyluridine
  modified_base 51: mod_base = OTHER; note = 2'-O-methyluridine
  modified_base 53: mod_base = OTHER; note = Inosine
  modified_base 54: mod_base = OTHER; note = Inosine
  modified_base 55: mod_base = OTHER; note = 2'-O-methyladenosine
  modified_base 56: mod_base = OTHER; note = 2'-O-methylcytidine
  modified_base 57: mod_base = OTHER; note = 2'-O-methyluridine
  modified_base 58: mod_base = OTHER; note = 2'-O-methyluridine
  modified_base 59: mod_base = OTHER; note = 2'-O-methylcytidine phosphorothioate
  modified_base 60: mod_base = OTHER; note = 2'-O-methylcytidine phosphorothioate
  modified_base 61: mod_base = OTHER; note = 2'-O-methyluridine phosphorothioate
  modified_base 62: mod_base = OTHER; note = 2'-O-methylguanosine phosphorothioate
  modified_base 63: mod_base = OTHER; note = 2'-O-methylcytidine
  misc_feature 1..51: note = RNA
  misc_feature 52..54: note = DNA
  misc_feature 55..63: note = RNA
gtggaatagtataacaatatgctaaatgttgttatagtatcccaccagctttnnacttcctgc

SEQ ID NO: 249 - DNA, 63 bp, synthetic construct
  source 1..63: mol_type = other DNA; note = Description of Artificial Sequence: Synthetic oligonucleotide; note = Description of Combined DNA/RNA Molecule: Synthetic oligonucleotide
  modified_base 1: mod_base = OTHER; note = 2'-O-methylguanosine phosphorothioate
  modified_base 2: mod_base = OTHER; note = 2'-O-methyluridine phosphorothioate
  modified_base 3: mod_base = OTHER; note = 2'-O-methylguanosine phosphorothioate
  modified_base 4: mod_base = OTHER; note = 2'-O-methylguanosine phosphorothioate
  modified_base 5: mod_base = OTHER; note = 2'-O-methyladenosine
  modified_base 6: mod_base = OTHER; note = 2'-O-methyladenosine
  modified_base 7: mod_base = OTHER; note = 2'-O-methyluridine
  modified_base 8: mod_base = OTHER; note = 2'-O-methyladenosine
  modified_base 9: mod_base = OTHER; note = 2'-O-methylguanosine
  modified_base 10: mod_base = OTHER; note = 2'-O-methyluridine
  modified_base 11: mod_base = OTHER; note = 2'-O-methyladenosine
  modified_base 12: mod_base = OTHER; note = 2'-O-methyluridine
  modified_base 13: mod_base = OTHER; note = 2'-O-methyladenosine
  modified_base 14: mod_base = OTHER; note = 2'-O-methyladenosine
  modified_base 15: mod_base = OTHER; note = 2'-O-methylcytidine
  modified_base 16: mod_base = OTHER; note = 2'-O-methyladenosine
  modified_base 17: mod_base = OTHER; note = 2'-O-methyladenosine
  modified_base 18: mod_base = OTHER; note = 2'-O-methyluridine
  modified_base 19: mod_base = OTHER; note = 2'-O-methyladenosine
  modified_base 20: mod_base = OTHER; note = 2'-O-methyluridine
  modified_base 21: mod_base = OTHER; note = 2'-O-methylguanosine
  modified_base 22: mod_base = OTHER; note = 2'-O-methylcytidine
  modified_base 23: mod_base = OTHER; note = 2'-O-methyluridine
  modified_base 24: mod_base = OTHER; note = 2'-O-methyladenosine
  modified_base 25: mod_base = OTHER; note = 2'-O-methyladenosine
  modified_base 26: mod_base = OTHER; note = 2'-O-methyladenosine
  modified_base 27: mod_base = OTHER; note = 2'-O-methyluridine
  modified_base 28: mod_base = OTHER; note = 2'-O-methylguanosine
  modified_base 29: mod_base = OTHER; note = 2'-O-methyluridine
  modified_base 30: mod_base = OTHER; note = 2'-O-methyluridine
  modified_base 31: mod_base = OTHER; note = 2'-O-methylguanosine
  modified_base 32: mod_base = OTHER; note = 2'-O-methyluridine
  modified_base 33: mod_base = OTHER; note = 2'-O-methyluridine
  modified_base 34: mod_base = OTHER; note = 2'-O-methyladenosine
  modified_base 35: mod_base = OTHER; note = 2'-O-methyluridine
  modified_base 36: mod_base = OTHER; note = 2'-O-methyladenosine
  modified_base 37: mod_base = OTHER; note = 2'-O-methylguanosine
  modified_base 38: mod_base = OTHER; note = 2'-O-methyluridine
  modified_base 39: mod_base = OTHER; note = 2'-O-methyladenosine
  modified_base 40: mod_base = OTHER; note = 2'-O-methyluridine
  modified_base 41: mod_base = OTHER; note = 2'-O-methylcytidine
  modified_base 42: mod_base = OTHER; note = 2'-O-methylcytidine
  modified_base 43: mod_base = OTHER; note = 2'-O-methylcytidine
  modified_base 44: mod_base = OTHER; note = 2'-O-methyladenosine
  modified_base 45: mod_base = OTHER; note = 2'-O-methylcytidine
  modified_base 46: mod_base = OTHER; note = 2'-O-methylcytidine
  modified_base 47: mod_base = OTHER; note = 2'-O-methyladenosine
  modified_base 48: mod_base = OTHER; note = 2'-O-methylguanosine
  modified_base 49: mod_base = OTHER; note = 2'-O-methylcytidine
  modified_base 50: mod_base = OTHER; note = 2'-O-methyluridine
  modified_base 51: mod_base = OTHER; note = 2'-O-methyluridine
  modified_base 52: mod_base = OTHER; note = Inosine
  modified_base 54: mod_base = OTHER; note = Inosine
  modified_base 55: mod_base = OTHER; note = 2'-O-methyladenosine
  modified_base 56: mod_base = OTHER; note = 2'-O-methylcytidine
  modified_base 57: mod_base = OTHER; note = 2'-O-methyluridine
  modified_base 58: mod_base = OTHER; note = 2'-O-methyluridine
  modified_base 59: mod_base = OTHER; note = 2'-O-methylcytidine phosphorothioate
  modified_base 60: mod_base = OTHER; note = 2'-O-methylcytidine phosphorothioate
  modified_base 61: mod_base = OTHER; note = 2'-O-methyluridine phosphorothioate
  modified_base 62: mod_base = OTHER; note = 2'-O-methylguanosine phosphorothioate
  modified_base 63: mod_base = OTHER; note = 2'-O-methylcytidine
  misc_feature 1..51: note = RNA
  misc_feature 52..54: note = DNA
  misc_feature 55..63: note = RNA
gtggaatagtataacaatatgctaaatgttgttatagtatcccaccagcttncnacttcctgc

SEQ ID NO: 250 - DNA, 63 bp, synthetic construct
  source 1..63: mol_type = other DNA; note = Description of Artificial Sequence: Synthetic oligonucleotide; note = Description of Combined DNA/RNA Molecule: Synthetic oligonucleotide
  modified_base 1: mod_base = OTHER; note = 2'-O-methylguanosine phosphorothioate
  modified_base 2: mod_base = OTHER; note = 2'-O-methyluridine phosphorothioate
  modified_base 3: mod_base = OTHER; note = 2'-O-methylguanosine phosphorothioate
  modified_base 4: mod_base = OTHER; note = 2'-O-methylguanosine phosphorothioate
  modified_base 5: mod_base = OTHER; note = 2'-O-methyladenosine
  modified_base 6: mod_base = OTHER; note = 2'-O-methyladenosine
  modified_base 7: mod_base = OTHER; note = 2'-O-methyluridine
  modified_base 8: mod_base = OTHER; note = 2'-O-methyladenosine
  modified_base 9: mod_base = OTHER; note = 2'-O-methylguanosine
  modified_base 10: mod_base = OTHER; note = 2'-O-methyluridine
  modified_base 11: mod_base = OTHER; note = 2'-O-methyladenosine
  modified_base 12: mod_base = OTHER; note = 2'-O-methyluridine
  modified_base 13: mod_base = OTHER; note = 2'-O-methyladenosine
  modified_base 14: mod_base = OTHER; note = 2'-O-methyladenosine
  modified_base 15: mod_base = OTHER; note = 2'-O-methylcytidine
  modified_base 16: mod_base = OTHER; note = 2'-O-methyladenosine
  modified_base 17: mod_base = OTHER; note = 2'-O-methyladenosine
  modified_base 18: mod_base = OTHER; note = 2'-O-methyluridine
  modified_base 19: mod_base = OTHER; note = 2'-O-methyladenosine
  modified_base 20: mod_base = OTHER; note = 2'-O-methyluridine
  modified_base 21: mod_base = OTHER; note = 2'-O-methylguanosine
  modified_base 22: mod_base = OTHER; note = 2'-O-methylcytidine
  modified_base 23: mod_base = OTHER; note = 2'-O-methyluridine
  modified_base 24: mod_base = OTHER; note = 2'-O-methyladenosine
  modified_base 25: mod_base = OTHER; note = 2'-O-methyladenosine
  modified_base 26: mod_base = OTHER; note = 2'-O-methyladenosine
  modified_base 27: mod_base = OTHER; note = 2'-O-methyluridine
  modified_base 28: mod_base = OTHER; note = 2'-O-methylguanosine
  modified_base 29: mod_base = OTHER; note = 2'-O-methyluridine
  modified_base 30: mod_base = OTHER; note = 2'-O-methyluridine
  modified_base 31: mod_base = OTHER; note = 2'-O-methylguanosine
  modified_base 32: mod_base = OTHER; note = 2'-O-methyluridine
  modified_base 33: mod_base = OTHER; note = 2'-O-methyluridine
  modified_base 34: mod_base = OTHER; note = 2'-O-methyladenosine
  modified_base 35: mod_base = OTHER; note = 2'-O-methyluridine
  modified_base 36: mod_base = OTHER; note = 2'-O-methyladenosine
  modified_base 37: mod_base = OTHER; note = 2'-O-methylguanosine
  modified_base 38: mod_base = OTHER; note = 2'-O-methyluridine
  modified_base 39: mod_base = OTHER; note = 2'-O-methyladenosine
  modified_base 40: mod_base = OTHER; note = 2'-O-methyluridine
  modified_base 41: mod_base = OTHER; note = 2'-O-methylcytidine
  modified_base 42: mod_base = OTHER; note = 2'-O-methylcytidine
  modified_base 43: mod_base = OTHER; note = 2'-O-methylcytidine
  modified_base 44: mod_base = OTHER; note = 2'-O-methyladenosine
  modified_base 45: mod_base = OTHER; note = 2'-O-methylcytidine
  modified_base 46: mod_base = OTHER; note = 2'-O-methylcytidine
  modified_base 47: mod_base = OTHER; note = 2'-O-methyladenosine
  modified_base 48: mod_base = OTHER; note = 2'-O-methylguanosine
  modified_base 49: mod_base = OTHER; note = 2'-O-methylcytidine
  modified_base 50: mod_base = OTHER; note = 2'-O-methyluridine
  modified_base 51: mod_base = OTHER; note = 2'-O-methyluridine
  modified_base 52: mod_base = OTHER; note = Inosine
  modified_base 53: mod_base = OTHER; note = Inosine
  modified_base 54: mod_base = OTHER; note = Inosine
  modified_base 55: mod_base = OTHER; note = 2'-O-methyladenosine
  modified_base 56: mod_base = OTHER; note = 2'-O-methylcytidine
  modified_base 57: mod_base = OTHER; note = 2'-O-methyluridine
  modified_base 58: mod_base = OTHER; note = 2'-O-methyluridine
  modified_base 59: mod_base = OTHER; note = 2'-O-methylcytidine phosphorothioate
  modified_base 60: mod_base = OTHER; note = 2'-O-methylcytidine phosphorothioate
  modified_base 61: mod_base = OTHER; note = 2'-O-methyluridine phosphorothioate
  modified_base 62: mod_base = OTHER; note = 2'-O-methylguanosine phosphorothioate
  modified_base 63: mod_base = OTHER; note = 2'-O-methylcytidine
  misc_feature 1..51: note = RNA
  misc_feature 52..54: note = DNA
  misc_feature 55..63: note = RNA
gtggaatagtataacaatatgctaaatgttgttatagtatcccaccagcttnnnacttcctgc

1. A method of editing a MECP2 polynucleotide comprising a single nucleotide polymorphism (SNP) associated with Rett syndrome, the method comprising contacting the MECP2 polynucleotide with a guide oligonucleotide capable of effecting an adenosine deaminase acting on RNA (ADAR)-mediated adenosine to inosine alteration of the SNP associated with Rett syndrome, thereby editing the MECP2 polynucleotide.

2. (canceled)

3. The method of claim 1, wherein the cell endogenously expresses ADAR.

4-9. (canceled)

10. A method of treating Rett syndrome in a subject in need thereof, the method comprising
contacting the MECP2 polynucleotide in a cell of the subject with a guide oligonucleotide capable of effecting an adenosine deaminase acting on RNA (ADAR)-mediated adenosine to inosine alteration of the SNP associated with Rett syndrome, thereby treating the subject.

11. A method of treating Rett syndrome in a subject in need thereof, the method comprising
contacting the MECP2 polynucleotide in a cell with a guide oligonucleotide capable of effecting an adenosine deaminase acting on RNA (ADAR)-mediated adenosine to inosine alteration of the SNP associated with Rett syndrome, and
administering the cell to the subject, thereby treating the subject.

12-13. (canceled)

14. The method of claim 1, wherein the guide oligonucleotide comprises a nucleic acid sequence complementary to a MECP2 mRNA sequence comprising the SNP associated with Rett syndrome.

15. The method of claim 1, wherein the oligonucleotide further comprises one or more adenosine deaminase acting on RNA (ADAR)-recruiting domains.

16. The method of claim 1, wherein the MECP2 polynucleotide encodes a MECP2 protein comprising a pathogenic amino acid comprising a premature stop codon at positions 255, 168, 294 and/or 270, resulting from the SNP.

17. The method of claim 16, wherein the adenosine to inosine alteration substitutes the pathogenic amino acid with a wild type amino acid, wherein the wild type amino acid at positions 255, 168, 294 and/or 270 is an arginine.

18. (canceled)

19. The method of claim 1, wherein the guide oligonucleotide comprises the structure:
[Aₘ]-X¹-X²-X³—[Bₙ]
wherein each of A and B is a nucleotide;
m and n are each, independently, an integer from 5 to 40;
X¹, X², and X³ are each, independently, a nucleotide, wherein at least one of X¹, X², or X³ is an alternative nucleotide.

20. The method of claim 1, wherein the guide oligonucleotide comprises the structure:
[Aₘ]-X¹-X²-X³—[Bₙ]
wherein each of A and B is a nucleotide;
m and n are each, independently, an integer from 5 to 40;
X¹, X², and X³ are each, independently, a nucleotide, wherein at least one of X¹, X², or X³ has the structure of any one of Formula I-I: [chemical structure]
wherein N¹ is hydrogen or a nucleobase;
R¹ is hydroxy, halogen, or C₁-C₆ alkoxy;
R² is hydrogen, hydroxy, halogen, or C₁-C₆ alkoxy; and
R³ is hydrogen, hydroxy, halogen, or C₁-C₆ alkoxy.

21-27. (canceled)

28. The method of claim 20, wherein at least one of X¹, X², and X³ has the structure of Formula I, wherein R¹ is fluoro, hydroxy, or O-methyl, and N¹ is a nucleobase.

29-102. (canceled)

103. The method of claim 1, wherein the guide oligonucleotide comprises the structure:
[Aₘ]-X¹-X²-X³—[Bₙ]
wherein each of A and B is a nucleotide;
m and n are each, independently, an integer from 5 to 40;
X¹, X², and X³ are each, independently, a nucleotide, wherein at least one of X¹, X², and X³ has the structure of any one of Formula XII-XV: [chemical structure]
wherein N¹ is hydrogen or a nucleobase;
R⁶ is hydrogen, hydroxy, or halogen;
R⁷ is hydrogen, hydroxy, halogen, or C₁-C₆ alkoxy;
R⁸ is hydrogen or halogen;
R⁹ is hydrogen or hydroxy, halogen, or C₁-C₆ alkoxy;
R¹⁰ Is hydrogen or halogen; and
R¹¹ is hydrogen or hydroxy, halogen, or C₁-C₆ alkoxy.

104-106. (canceled)

107. The method of claim 103, wherein at least one of X¹, X², and X³ has the structure of Formula XIII, in which each of R⁸ and R⁹ is hydrogen.

108-128. (canceled)

129. The method of claim 19, wherein each of [Aₘ] and [Bₙ] comprises at least four terminal phosphorothioate linkages.

130-137. (canceled)

138. The method of claim 19, wherein at least 20% of the nucleotides of [Aₘ] and [Bₙ] combined are 2′-O-methyl-nucleotides.

139-144. (canceled)

145. The method of claim 20, wherein at least one of X¹, X², and X³ has the structure of Formula I, wherein R¹ is fluoro, hydroxy, or methoxy and N¹ is a nucleobase each of X¹, X², and X³ that does not have the structure of Formula I is a ribonucleotide; [Aₘ] and [Bₙ] each comprise at least five terminal 2′-O-methyl-nucleotides and at least four terminal phosphorothioate linkages; and at least 20% of the nucleotides of [Aₘ] and [Bₙ] combined are 2′-O-methyl-nucleotides.

146. (canceled)

147. The method of claim 103, wherein at least of X¹, X², and X³ has the structure of Formula XIII, wherein R⁸ and R⁹ are each hydrogen, and each of X¹, X² and X³ that does not have the structure of Formula XII is a ribonucleotide; [Aₘ] and [Bₙ] each include at least five terminal 2′-O-methyl-nucleotides and at least four terminal phosphorothioate linkages; and at least 20% of the nucleotides of [Aₘ] and [Bₙ] combined are 2′-O-methyl-nucleotides.
